(19) United States
(12) Patent Application Publication
(10) Pub. No.: US 2023/0317205 A1
(43) Pub. Date: Oct. 5, 2023

(54) SYSTEMS AND METHODS FOR PRODUCING OR IDENTIFYING NON-HUMAN ANIMALS WITH A PREDETERMINED PHENOTYPE OR GENOTYPE

(71) Applicant: Etalon Diagnostics, Menlo Park, CA (US)

(72) Inventors: Christa LAFAYETTE, Menlo Park, CA (US); Russell KERSCHMANN, Menlo Park, CA (US); Katie Anne MARTIN, Hollister, CA (US); Erica Grace WAGNER LUNDQUIST, Fountain Valley, CA (US)

(21) Appl. No.: 18/022,681

(22) PCT Filed: Aug. 31, 2021
(86) PCT No.: PCT/US21/48516

§ 371 Date: Feb. 22, 2023

Related U.S. Application Data
(60) Provisional application No. 63/072,883, filed on Aug. 31, 2020.

(51) Int. Cl. G16B 20/00; G16B 10/00

(52) U.S. Cl. CPC G16B 20/00; G16B 10/00

(57) ABSTRACT

The present disclosure provides methods and computer-implemented systems for producing, procuring, or identifying a non-human animal or offspring thereof having one or more predetermined traits. Also disclosed herein are a computer implemented graphical user interface and database system containing information associated with one or more predetermined traits for use in generating a probability matrix containing an array of probability values pertaining to the likelihood of producing a non-human animal having one or more predetermined traits.

### SEQUENCE LISTING

[0001] The instant application contains a Sequence Listing which has been submitted electronically in ASCII format and is hereby incorporated by reference in its entirety. Said ASCII copy, created on Aug. 26, 2021, is named “51370-003WO2_Sequence_Listing_8_26_21_ST25.txt” and is 2,020,983 bytes in size.

### BACKGROUND

[0002] Animal breeders have long relied on overt phenotypic proxies of animal health and performance in order to select for specific traits desired in the animal. Such proxies include personal testimony from the animal seller, morphological features, age, abilities, and pedigree of the animal. Selection strategies based on these parameters may, and often does, result in inadvertent co-selection of undesired traits (e.g., disease conditions) that are genetically linked with a desired trait and that are unrecognized by the animal enthusiast during breeding.

[0003] The technological development of clinical diagnostic testing for veterinarian use has enabled more accurate identification of genetic markers associated with specific traits. Nonetheless, existing diagnostic platforms generally focus on single gene-trait correspondences that emphasize selection of athletic traits, thus limiting the ability to provide a holistic assessment of an animal in order to predict its future health and performance. Therefore, there exists a need for an integrative diagnostic platform that evaluates a broad spectrum of animal traits based on multiple sources of information, including genetic and non-genetic information, to facilitate production or identification of animals having desirable characteristics suited for the intended use of the animal or preferred by the owner.

### SUMMARY OF THE DISCLOSURE

[0004] The present disclosure provides methods, computer-implemented systems, and databases for producing, procuring, and/or identifying a non-human animal having one or more predetermined traits (e.g., traits pertaining to physical appearance, morphology, health, and performance). The disclosure features a computer-implemented database system containing information associated with one or more predetermined traits (e.g., genetic information and non-genetic information) for use in determining a probability of producing a non-human animal having one or more predetermined. The methods and systems disclosed herein are also useful for selecting one or more predetermined traits of a non-human animal, identifying potential breeding pair matches capable of producing the animal having the traits of interest, identifying potential health risks associated with the selection of said traits, and identifying existing animals having the one or more predetermined traits. The methods and systems disclosed herein are also applicable for the production of genetically-modified (e.g., transgenic) non-human animals having one or more predetermined traits of interest. The disclosed methods may be used for assessing the health, behavior, performance, predispositions, and/or monetary value of an animal. Such information may be particularly useful in making decisions pertaining to breeding, husbandry, medical treatment, diet, exercise, environmental exposure, supplementary treatments, training, conditioning, use, limitation, and/or destiny determination (e.g., discipline) of the animal.

[0005] In a first aspect, the present disclosure provides a method of producing a non-human offspring animal having one or more (e.g., 1, 2, 3, 4, 5, 6, 7, 8, 9, 10, or more) predetermined traits. In some embodiments, the method includes selecting one more predetermined traits desired in the offspring animal using a computer-implemented database system. In some embodiments, the method includes interrogating the database system to identify one or more (e.g., 1, 2, 3, 4, 5, 6, 7, 8, 9, 10, 15, 20, or more) breeding pairs capable of producing the offspring animal. In some embodiments, the method includes generating a probability matrix for each of the one or more breeding pairs using the database system, wherein the probability matrix includes an array of probability values pertaining to the likelihood that the offspring animal produced by each said breeding pair will have the one or more predetermined traits. In some embodiments, the method includes selecting, based on the array of probability values, one or more of the breeding pairs likely to produce the offspring animal having the one or more predetermined traits. In some embodiments, the method includes breeding one or more of the selected breeding pairs to produce the offspring animal. In some embodiments, the method includes performing genetic testing of the offspring animal to detect the presence of the one or more predetermined traits. In some embodiments, the genetic testing indicates that the offspring animal has the one or more predetermined traits. In some embodiments, the genetic testing indicates that the offspring animal lacks the one or more predetermined traits. In some embodiments, the method includes genetically modifying the offspring animal lacking the one or more predetermined traits to promote or improve expression of the one or more predetermined traits. In some embodiments, the offspring animal lacking the one or more predetermined traits lacks one or more genes (e.g., any one of the genes disclosed herein) or variants thereof that promote the expression of the one or more predetermined traits. In some embodiments, the offspring animal lacking the one or more predetermined traits has one or more genes or variants thereof that that suppress the expression of the one or more predetermined traits. In still other embodiments, the offspring animal lacking the one or more predetermined traits has a variant of one or more genes (e.g., one or more SNPs or other genetic mutation(s), such as deletions, inversions, and duplications) the expression of which results in the absence of the one or more predetermined traits. The genetic variation may also occur in a non-coding, extra-coding, or other regulatory region of the gene(s).

[0006] In some embodiments, the genetic testing and/or the genetic modification is performed in the offspring animal during embryonic development. In some embodiments, the genetic testing and or the genetic modification is performed in the offspring animal 3 to 60 (e.g., 3, 4, 5, 6, 7, 8, 9, 10, 11-15, 16-20, 21-25, 26-30, 31-35, 36-40, 41-45, 46-50, 51-55, or 56-60) days after conception. In some embodiments, the method further includes birthing the offspring animal. In some embodiments, the genetic testing and/or the genetic modification is performed in the offspring animal one day to four years after birth. In some embodiments, the method further includes confirming the presence of one or more predetermined traits in the offspring animal after birth. In some embodiments, the method further includes genetically modifying the offspring animal lacking the one or more predetermined traits after birth.

[0007] In some embodiments, the genetic testing is performed in a sample obtained from the offspring animal. In some embodiments, the sample includes blood, tissue, hair, cell-free fetal DNA (e.g., cell-free fetal DNA obtained from a female parent animal during prenatal development of the offspring animal), mitochondria (e.g., mitochondria obtained from the female parent animal or the offspring animal), a gamete (e.g., a gamete of one or more parent animals of the offspring animal), or an embryo of the offspring animal implanted as part of an in vitro fertilization procedure. In some embodiments, the gamete is an oocyte. In some embodiments, the gamete is a spermatozoon. In some embodiments, the gamete includes a cytoplasm, a nucleus, and a mitochondrion.

[0008] In some embodiments, the genetic testing is performed using Sanger sequencing, Next Generation Sequencing, AmpliSeq, microarray, genomic sequencing (e.g., genome wide association study (GWAS)), or real-time quantitative polymerase chain reaction (RT-qPCR).

[0009] In some embodiments, the expression of the one or more predetermined traits results from expression of one or more (e.g., 1, 2, 3, 4, 5, 6, 7, 8, 9, 10, or more) genes. In some embodiments, genetically modifying the offspring animal includes modifying at least 1, at least 2, at least 3, at least 4, at least 5, at least 6, at least 7, at least 8, at least 9, or at least 10 genes in the offspring animal.

[0010] In some embodiments, genetically modifying the offspring animal includes editing of an endogenous gene in the offspring animal. In some embodiments, the endogenous gene includes a polymorphism (e.g., a single nucleotide polymorphism). In some embodiments, the endogenous gene includes a genetic mutation (e.g., insertion, deletion (e.g., knockout), translocation, inversion, single point mutation, or other mutation). In some embodiments, editing of the endogenous gene includes modifying, deleting, or replacing at least one nucleotide of a DNA or an RNA encoding the endogenous gene in the offspring animal. In some embodiments, the editing of an endogenous gene includes inserting a donor polynucleotide into a region of the endogenous gene in the offspring animal. In some embodiments, the donor polynucleotide includes a segment of the endogenous gene that lacks the polymorphism. In some embodiments, the donor polynucleotide includes a segment of the endogenous gene that lacks the genetic mutation. In some embodiments, the editing of an endogenous gene includes administering to the offspring animal a polynucleotide encoding one or more copies of a wild type variant of the endogenous gene. In some embodiments, the editing of an endogenous gene includes introducing a heterologous transgene into the genome of the offspring animal. In some embodiments, the editing of an endogenous gene includes modulating (e.g., increasing or decreasing) expression of an endogenous gene in the offspring animal. In some embodiments, modulating expression of an endogenous gene includes increasing expression of the endogenous gene in the offspring animal. In some embodiments, modulating expression of an endogenous gene includes decreasing expression of the endogenous gene in the offspring animal.

[0011] In some embodiments, genetically modifying the offspring animal is performed using a clustered regularly interspaced short palindromic repeats (CRISPR)-Cas system, a transcription activator-like effector nuclease (TALEN), or a zinc finger nuclease (ZFN). In some embodiments, the CRISPR-Cas system includes at least one guide RNA (gRNA) and at least one Cas9 endonuclease. In some embodiments, the Ca9 nuclease includes a nuclease-competent Cas9 endonuclease or a nuclease-inactivated Cas9 (dCas9) endonuclease. In some embodiments, a nuclease-competent Cas9 endonuclease or a nuclease-inactivated Cas9 (dCas9) endonuclease. In some embodiments, the transcriptional regulator domain is selected from a group consisting of VP16, VP64, p65, RTA, VPR, SAM, SunTag, and KRAB.

[0012] In some embodiments, the breeding pair capable of producing the offspring animal is integrated into the database system. In some embodiments, the breeding pair is integrated into the database system by providing information about one or more predetermined traits in the breeding pair. In some embodiments, the information about the one or more predetermined traits in the breeding pair includes results of previously performed genetic testing and/or non-genetic assessment of the plurality of non-human animals, wherein the results of the previously performed genetic testing or non-genetic assessment identify the breeding pair as having one or more of the predetermined traits. In some embodiments, the information about the one or more predetermined traits in the breeding pair includes results of genetic testing and/or non-genetic assessment of the breeding pair confirm the presence of one or more of the predetermined traits the breeding pair. In some embodiments, the information about the one or more predetermined traits is catalogued into the database system. In some embodiments, the database system is configured for interrogation by a user and is configured to produce the probability matrix following said interrogation.

[0013] In some embodiments, the method further includes registering the offspring animal having the one or more predetermined traits in the database system as a breeder animal.

[0014] In another aspect, the present disclosure provides a method for interrogating a computer-implemented database system to identify one or more breeding pairs capable of producing a non-human offspring animal having one or more predetermined traits. In some embodiments, the method includes selecting one or more predetermined traits desired in the offspring animal using the database system. In some embodiments, the method includes identifying the one or more breeding pairs capable of producing the offspring animal using the database system. In some embodiments, the method includes generating a probability matrix for each of the one or more breeding pairs using the database system, wherein the probability matrix includes an array of probability values pertaining to the likelihood that the offspring animal produced by each said breeding pair will have the one or more predetermined traits and displaying the probability matrix on a computer-implemented interface. In some embodiments, the method includes selecting, based on the array of probability values, one or more of the breeding pairs likely to produce the offspring animal having the one or more predetermined traits. In some embodiments, the method includes breeding the one or more breeding pairs to produce the offspring animal.

[0015] In some embodiments, the database includes a panel of at least 2 (e.g., at least 2, 4, 8, 10, 20, 30, 40, 50, 100, 200, 400, 600, 800, 1000, or more) predetermined traits. In some embodiments, the database includes a panel of 2-40 (e.g., 2, 3, 4, 5, 6, 7, 8, 9, 10, 15, 20, 25, 35, or 40) predetermined traits. In some embodiments, the database includes a panel of at least 4 predetermined traits. In some embodiments, the database includes a panel of at least 6 predetermined traits. In some embodiments, the database includes a panel of at least 8 predetermined traits. In some embodiments, the database includes a panel of at least 10 predetermined traits.

[0016] In some embodiments, the method includes selecting a panel of 2-40 predetermined traits. In some embodiments, the method includes selecting a panel of 2 or more predetermined traits. In some embodiments, the method includes selecting a panel of 4 or more predetermined traits. In some embodiments, the method includes selecting a panel of 6 or more predetermined traits. In some embodiments, the method includes selecting a panel of 8 or more predetermined traits. In some embodiments, the method includes selecting a panel of 10 or more predetermined traits.

[0017] In some embodiments, the method includes confirming the presence of one or more of the predetermined traits in the offspring animal. In some embodiments, the method includes confirming the presence of 2-40 of the predetermined traits. In some embodiments, the method includes confirming the presence of 2 or more of the predetermined traits. In some embodiments, the method includes confirming the presence of 4 or more of the predetermined traits. In some embodiments, the method includes confirming the presence of 6 or more of the predetermined traits. In some embodiments, the method includes confirming the presence of 8 or more of the predetermined traits. In some embodiments, the method includes confirming the presence of 10 or more of the predetermined traits.

[0018] In some embodiments, genetic testing was previously performed on the breeding pair.

[0019] In some embodiments, the method further includes registering the offspring animal having the one or more predetermined traits in the database system as a breeder animal.

[0020] In another aspect, the present disclosure provides a method of producing a set of guidelines for breeding of a non-human animal. In some embodiments, the method includes identifying the non-human animal in a computer-implemented database and assessing the presence of one or more predetermined traits in the non-human animal using the computer-implemented database system. In some embodiments, the identifying and assessing steps include generating a probability matrix for the non-human animal using the database system, wherein the probability matrix includes an array of probability values pertaining to the likelihood that the non-human animal has the one or more predetermined traits. In some embodiments, the identifying and assessing steps include displaying the probability matrix on a graphical user interface. In some embodiments, the method further includes determining, based on the assessment step, one or more conditions under which the non-human animal will develop or is at risk of developing a disease or non-disease condition. In some embodiments, the method further includes generating the set of guidelines for breeding of the non-human animal to avoid manifestation of the disease or non-disease condition.

[0021] In some embodiments, the non-human animal is used in a breeding pair to produce an offspring animal.

[0022] In some embodiments, the set of guidelines includes one or more (e.g., 1, 2, 3, 4, 5, 6, 7, 8, 9, 10, or more) recommendations for mitigating or avoiding the one or more conditions that would result in manifestation of one or more (e.g., 1, 2, 3, 4, 5, 6, 7, 8, 9, 10, or more) symptoms of the disease or non-disease condition and/or for reducing the likelihood of producing an effect in the offspring animal resulting from development of the disease or non-disease condition.

[0023] In some embodiments, the non-human animal is a female parent animal. In some embodiments, the non-human animal is a male parent animal.

[0024] In some embodiments, the set of guidelines provides one or more recommendations that increases the likelihood of producing a non-human offspring animal having one or more predetermined traits. In some embodiments, the one or more recommendations pertain to a diet, exercise regime, discipline, environmental exposure, medication, supplementary treatments, training, conditioning, use, and/or limitation of the non-human animal.

[0025] In another aspect, the present disclosure provides a method of generating a computer-implemented database system for producing a non-human offspring animal having one or more predetermined traits. In some embodiments, the method includes providing information about the one or more predetermined traits from a plurality of non-human animals of a same type as the offspring animal. In some embodiments, the information includes results of previously performed genetic testing and/or non-genetic assessment of the plurality of non-human animals, wherein the results of the previously performed genetic testing or non-genetic assessment identify the plurality of non-human animals as having one or more of the predetermined traits. In some embodiments, the information includes results of genetic testing and/or non-genetic assessment of the plurality of non-human animals that confirm the presence of one or more of the predetermined traits in the plurality of non-human animals. In some embodiments, the method includes cataloguing the information into the database system. In some embodiments, the database system is configured for interrogation by a user and is configured to produce a probability matrix based on the catalogued information following said interrogation.

[0026] In some embodiments, the interrogation includes selecting one or more predetermined traits desired in the offspring animal and identifying from the plurality of non-human animals a breeding pair capable of producing said offspring animal. In some embodiments, the method further includes selecting a breeding pair capable of producing the offspring having the one or more predetermined traits. In some embodiments, the probability matrix includes an array of probability values pertaining to the likelihood of the selected breeding pair producing a non-human offspring animal having the one or more predetermined traits. In some embodiments, the probability matrix includes an array of probability values pertaining to the likelihood of the plurality of non-human animals having the one or more predetermined traits.

[0027] In some embodiments, the non-genetic assessment includes obtaining or having obtained information from someone knowledgeable about the non-human animal pertaining to the one or more predetermined traits. In some embodiments, the non-genetic assessment includes performing or having performed one or more clinical assays on biological tissue obtained from the non-human animal pertaining to the one or more predetermined traits. In some embodiments, the non-genetic assessment includes performing or having performed one or more diagnostic tests on the non-human animal pertaining to the one or more predetermined traits. In some embodiments, the non-genetic assessment includes obtaining scores assigned to the non-human animal during a competition pertaining to the one or more predetermined traits.

[0028] In another aspect, the present disclosure provides a computer-implemented interface for assisting a user in producing, procuring, and/or identifying one or more non-human animals having one or more predetermined traits. In some embodiments, the interface is configured to allow a user to interrogate a computer-implemented database system. In some embodiments, the interrogation includes selecting the one or more predetermined traits of interest for the one or more non-human animals. In some embodiments, the interrogation includes identifying one or more of the non-human animals catalogued in the database system and generating a probability matrix for each of the one or more non-human animals identified using the database system. In some embodiments, the probability matrix includes an array of probability values pertaining to the likelihood that the non-human animal has the one or more predetermined traits. In some embodiments, the method includes, based on the probability matrix, displaying an overall assessment of each of the non-human animals having the one or more predetermined traits. In some embodiments, the method includes providing an option for the user to produce, purchase, or lease one or more of the non-human animals having the one or more predetermined traits. In some embodiments, the computer-implemented interface is in communication with the database system. In some embodiments, the method further includes selecting one or more predetermined traits of at least one parent of the one or more non-human animals. In some embodiments, the method further includes selecting a gene pool from which the one or more non-human animals or the at least one parent of the non-human animal are obtained. In some embodiments, the gene pool is selected from a group consisting of the user's own animals, animals owned by other users, an animal registry, and animals located within a specified geographical area.

[0029] In another aspect, the present disclosure provides a method of using a computer-implemented database system to identify a non-human animal as having one or more pre-determined traits, the method including: (a) providing information about the non-human animal; (b) cataloguing the information of step(a) into the database system; (c) comparing the information of step (b) to information about a plurality of non-human animals having the one or more predetermined traits, wherein the information about the plurality of non-human animals has been previously catalogued in the database system; (d) generating a probability matrix for the non-human animal based on the comparison of step (c) using the database system, wherein the probability matrix includes an array of probability values pertaining to the likelihood that the non-human animal has the one or more predetermined traits; (e) identifying the non-human animal as having the one or more predetermined traits based on the probability matrix of step (d); and (f) optionally, genetically modifying the non-human animal to promote or suppress an expression of the one or more predetermined traits in the non-human animal; wherein the information about the non-human animal includes results of previously performed genetic testing and/or non-genetic assessment of the non-human animal or the plurality of non-human animals.

[0030] In some embodiments of any of the foregoing aspects, the one or more predetermined traits include coat color, coat color modifier, coat texture, coat thickness, facial marking, leg marking, eye color, skin color, mane color, tail color, speed, gait, temperament, and health.

[0031] In some embodiments of any of the foregoing aspects, the coat color, mane color, and/or tail color is selected from the group consisting of amber champagne, amber champagne dun, amber cream, amber dun, amber dun pearl, apricot dun, apricot pearl, agouti, bay, bay cream pearl, bay double cream, bay pearl, black, black bay, black cream pearl, black double cream, black dun, black pearl, black/red, blanket appaloosa, blood bay, blue roan, brindle, brown, buckskin, buttermilk buckskin, champagne, champagne amber pearl, champagne classic pearl, champagne dun, champagne dun pearl, champagne gold pearl, champagne pearl, chesetnut, chestnut cream pearl, chocolate, classic champagne, classic champagne dun, classic cream, classic dun, cream, cream champagne, cream grullo, cream pearl, cremello, dapple grey, dark bay, dark brown, dark chestnut, dominant white, dun, dun bay cream, dun bay double cream, dun black cream, dun black double cream, dun chestnut cream, dun chestnut double cream, dun pearl, dun pearl bay, dun pearl black, dunalino, dunolino, dunskin, dunskin splash, flaxen chestnut, fleabitten grey, frame overo, frosted appaloosa, grey, gold champagne, gold cream, gold dun, gold dun pearl, grey, grullo, half blanket, leopard appaloosa, light grey, liver chestnut, marbled appaloosa, overo, palomino, pearl, perlino, perlino dun, pseudocream classic, red, red chestnut, red dun, red roan, rose grey, sabino, seal brown, silver, silver amber champagne, silver amber dun, silver bay cream, silver bay cream pearl, silver bay double cream, silver black, silver black cream pearl, silver black double cream, silver champagne, silver champagne dun, silver champagne pearl, silver classic champagne, silver classic champagne pearl, silver cream pearl, silver dapple, silver dapple bay, silver dapple buckskin, silver dapple cream grullo, silver dapple dun, silver dapple dunskin, silver dapple grullo, silver dapple pearl, silver dapple perlino, silver dapple perlino dun, silver dun, silver dun bay cream, silver dun bay double cream, silver dun black, silver dun black double cream, silver dun pearl, silver dun pearl bay, silver dun pearl black, silver pearl bay, silver pearl black, silver red, silver smoky cream, skewbald, smoky black, smoky cream, smoky grullo, snowflake appaloosa, sorrel, splashed white, steel grey, sun, tobiano, tovero, tri-color, white, and white spotting.

[0032] In some embodiments of any of the foregoing aspects, the coat color modifier is selected from a group consisting of apron, barring on body, barring on shoulder, belly spots (large or small), belly stripe, belted, bend or spots on body, bend or spots on head, birdcatcher spots, black spots, blagdon, blanket with roaning, blanket with spots, blaze, blaze with freckling, body spots, body white, brindle, brow spots, calico, coon/skunk tail, dapples, dilute, dorsal stripe, double dilute, ermine markings, few white hairs on body, fewspot, flaxen mane/tail, flea-bitten, fleshmark, frosted, grullo, heart marking, highlights in mane/tail, lacing pattern, leopard spotted, lightning marks, line back, frosting mane/tail, maximum tobiano, maximum overo, maximum white, maximum white sabino, medicine hat, minimal overo, minimal sabino, minimal tobiano, mixed mane/tail, mottled, no marking, overo, pangare, paw prints, pearl, piebald, pinto markings, rabicano, roan, roaning on body, rose, rump spots, sabino, skewbald, smudge marks, smutty, snip, snowcap, sooty, splash markings, star, stripe, tobiano, umbilical spots, white head, white mane/tail, white throat latch, white tipped ears, white with fading edges, white with ragged edges, white with smooth edges, wither spot, no markings, solid, white blaze, and white star.

[0033] In some embodiments of any of the foregoing aspects, the facial marking is selected from a group consisting of apron face, badger face, bald face, blaze, interrupted stripe, face, snip, star, stripe markings, both eyes amber, both eyes blue, both eyes brown, both eyes green, both eyes tiger, eyebrows, face mask, few white hairs on forehead, left eye amber, left eye blue, left eye brown, left eye green, left eye partial blue, left eye tiger, partial bald face, pigment around eye, right eye amber, right eye blue, right eye brown, right eye green, right eye partial blue, right eye tiger, white around eye, white chin, white jaw, white lip, white nose, and white sclera.

[0034] In some embodiments of any of the foregoing aspects, the leg marking is selected from a group consisting of two back white stockings, two white front socks, two white front stockings, two white hind socks, two white hind stockings, four white socks, four white stockings, back left above hock, back left cannon (¾ stocking), back left coronet, back left ermine spots, back left fetlock, back left half pastern, back left heel, back left partial heel, back left pastern, back left sock, back left stocking, back left stripes, back right above hock, back right cannon, back right coronet, back right ermine spots, back right fetlock, back right half pastern, back right heel, back right partial heel, back right pastern, back right sock, back right stocking, back right stripes, barring on legs, bend or spots on legs, front left above knee, front left cannon, front left coronet, front left ermine spots, front left fetlock, front left half pastern, front left heel, front left partial heel, front left pastern, front left sock, front left stocking, front left stripes, front right above knee, front right cannon, front right coronet, fright right ermine spots, front right fetlock, front right half pastern, front right heel, front right partial heel, front right pastern, front right sock, front right stocking, front right stripes, left front hoof stripes, left front white foot, left hind hoof stripes, left hind white foot, right front hoof stripes, right front white foot, right hind hoof stripes, right hind white foot, and roaning on white socks/stockings.

[0035] In some embodiments of any of the foregoing aspects, the coat texture includes smooth, rough, curly, straight, downy, spiky, or brindle.

[0036] In some embodiments of any of the foregoing aspects, the coat thickness includes thick, medium, or thin.

[0037] In some embodiments of any of the foregoing aspects, the eye color includes blue, amber, yellow, orange, hazel, green, or brown.

[0038] In some embodiments of any of the foregoing aspects, the skin color includes pink, black, brown, yellow, and white.

[0039] In some embodiments of any of the foregoing aspects, the speed is selected from the group consisting of endurance, mid-distance, and sprint.

[0040] In some embodiments of any of the foregoing aspects, the gait is selected from the group consisting of non-gaited, gait carrier, and gaited. In some embodiments, gaited includes walk, trot, canter, gallop, pacing, fox trot, racking, country pleasure, Indian shuffle, jogging, paso fino, paso corto, paso largo, paso llano, sobrandando, marcha picada, rack, running walk, stepping pace, singlefoot, tölt, and ravaal.

[0041] In some embodiments of any of the foregoing aspects, the temperament is selected from the group consisting of vigilant, curious/vigilant, curious, spooky, non-spooky, hot, cold, and medium.

[0042] In some embodiments of any of the foregoing aspects, the health includes variants of the one or more genes associated with one or more disease or non-disease conditions that are undesired in the non-human animal (e.g., one or more genes and associated disease or non-disease conditions recited in Table 10).

[0043] In some embodiments of any of the foregoing aspects, each of the one or more breeding pairs include at least a first non-human parent animal and a second parent animal.

[0044] In some embodiments of any of the foregoing aspects, the method further includes selecting the sex, breed, and/or discipline of the offspring animal, the first parent animal, and/or the second parent animal.

[0045] In some embodiments of any of the foregoing aspects, the breed is selected from the group consisting of Abyssianian/Ethiopian/Oromo/Gala horse, Abyssinian, Akhal Teke, Albanian, Albanian Horse, Alt-Olderburger, Altai Horse, American Cream Draft, American Cream and White, American Curly, American Gaited Mountain Horse, American Gaited Pony, American Paint Horse, American Quarter Horse, American Saddlebred, American Walking Pony, American Warmblood, Andalusian, Andravida, Andravida/Eleia Horse, Anglo European Warmblood, Anglo-Arab, Anglo-Kabarda, Appaloosa, Appendix Quarter Horse, AraAppaloosa, Arabian, Arabian Sporthorse, Ardennes, Ardennes Horse, Argentine Criollo, Asturcon, Asturian, Australian Brumby, Australian Stock Horse, Austrian Warmblood, Azteca, Baise Horse, Balearic, Baluchi, Baluchi Horse, Ban-ei, Banker, Banker Horse, Barb, Barb/Berber Horse, Bashkir, Bashkir Curly, Bashkir Curly Horse, Bashkir Horse, Basotho Pony, Basuto Pony, Belgian, Belgian Draft, Belgian Warmblood, Bhirum Pony, Bhirum/Nigerian Pony, Bhotia Pony, Bhutia Pony, Black Forest, Black Forest Pony, Blue Eyed Horse Association, Boer, Boerperd, Brandenburger, Breton, Breton Horse, British Riding Pony, British Warmblood, Buckskin, Budyonny, Budyonny Horse, Byelorussian Harness, Byelorussian Harness Horse, Camargue, Camargue Horse, Campolina, Canadian Horse, Canadian Sport Horse, Canadian Suffield Mustang, Canadian Warmblood, Carolina Marsh Tacky, Carthusian, Caspian, Caspian Horse, Cayuse, Celtic Warmblood, Cheju, Chicoteague Pony, Chilean Corralero, Chilean Corralero Horse, Chincoteague Pony, Cleveland Bay, Clydesdale, Colorado Ranger Horse, Connemara, Cream Draft, Cremello, Criollo, Crioulo, Curly Horse, Dales Pony, Danish Warmblood, Danube, Danube Delta Horse, Dartmoor Pony, Deliboz, Deliboz/Delibozskaya, Djerma, Dole, Dole Gudbrandsdal/Dolahest/Døle, Dongola, Donkey, Draft, Draft Cross, Draft Horse, Drum Horse, Dutch Draft, Dutch Harness, Dutch Harness Horse, Dutch Warmblood, East Bulgarian, East Friesian, Egyptian, Egyptian Arabian, Eriskay Pony, Estonian Horse/Estonian Native/Estonian Klepper/Eisti Hobune, Estonian Native, Exmoor Pony, Faeroe Pony, Faeroes Pony, Falabella, Falabella Miniature Horse, Fell Pony, Ferghana, Finnhorse, Finnhorse/Finnish Horse, Fjord, Fjord Horse, Fleuve, Florida Cracker, Florida Cracker Horse, Foundation Quarter Horse, Fouta, Foutanke/Fouta, Frederiksborg, Frederiksborg Horse, French Saddlebred, French Saddlebred Horse, French Trotter, Friesian, Friesian Cross, Galiceño, Galician Pony, Galician/Galician Mountain Horse, Gelderlander, Georgian Grande, German Bred, German Riding Pony, Gidran, Gidran/Hungarian Anglo-Arab, Golden American Saddlebred, Gotland, Gotland Pony, Groningen, Groningen Horse, Guangxi, Gypsy Cob, Gypsy Vanner, Hackney, Hackney Horse, Hackney Pony, Haflinger, Half-Arabian, Hanoverian, Hanoverian Warmblood, Hequ, Highland Pony, Hokkaido, Hokkaido Horse, Holsteiner, Holsteiner Warmblood, Hucul, Hucul Pony, Hungarian Warmblood, Iberian Warmblood, Icelandic, Icelandic Horse, lomud, lomud/Yomud/Yamud/Yomut, Irish Cob, Irish Draft, Irish Draught, Irish Draught Horse, Irish Sport Horse, Jeju Horse, Jinzhou, Jutland, Kabarda, Kabarda/Kabardin, Karabair, Karabakh, Kazakh, Kazakh Horse, Kentucky Mountain horse, Kentucky Mountain Saddle Horse, Kerry Bog Pony, KigeR Mustang, Kirdi Pony, Kisber Felver, Kiso, Kiso Horse, Kladbury, Kladbury Horse, Knabstrup, Knabstrupper Warmblood, Kushum, Kushum Horse, Kustanai, Kustanai Horse, Kyrgyz/Kirgiiz Horse, Latvian, Latvian Horse, Lipizzan, Lithuanian Heavy Draft, Lokai, Losino, Losino Horse, Lusitano, M Bayar, Mallorquin, Malopolski, Mangalarga, Mangalarga Marchador, Marsh Tacky, Marwari, Marwari Horse, Wrens Pony, Messara, Messara Horse, Miniature, Miniature Horse, Misaki, Misaki Horse, Missouri Fox Trotter, Missouri Fox Trotting Horse, Miyako, Miyako Pony, Mongolian, Mongolian Horse, Morab, Morgan, Mountain Pleasure Horse, Moyle, Mule, Murgese, Mustang, National Show horse, National Spotted horse, New Forest Pony, New Kirgiz, Newfoundland Pony, Nokota, Nokota Horse, Noma, Noma Horse, Nooitgedacht Pony, Nordland, Nordlandshest/Lyngshest/Nordland Pony, Norfolk Trotter, Noric, North Swedish horse, Northeastern, Ob, Oldenburg, Oldenburg Warmblood, Orlov Trotter, Paint (Overo), Paint (Solid), Paint (Tobiano), Paint (Tovero), Paints (All), Palomino, Pantaneiro, Pantaneiro horse, Paso Fino, Paulista Marchador, Peneia Pony, Percheron, Peruvian Paso, Pindos Pony, Pinia, Pintabian, Pinto, POA, Polish Horse, Ponies (All), Pony, Pony of America, Pottok, Priob/Ob, Przewalski, Przewalski Horse, Pura Raza Espanola (PRE), Pyrenean Tarpan, Qatgani, Qatgani/Qataghani Horse, Quarab, Quarter Horse, Quarter Horse Cross, Quarter Pony, Racking Horse, Rheinland Pfalz Saar, Rhenish Warmblood, Rhinelander horse, Rocky Mountain, Rocky Mountain Horse, Russian Don, Russian Heavy Draft, Russian Trakhener, Russian Trotter, Sanhe, Sanhe Horse, Schleswiger Heavy Draft, Scharzwälder Fuchs, Selle Francais, Shagya, Shagya Arabian, Shetland Pony, Shire, Single-Footing Horse, Skyros Pony, Somali Pony, Sorraia, Soviet Heavy Draft, Spanish Mustang, Spanish-Barb, Spanish-Norman, Spanish-Normal Horse, Sport Horse of Color, Spotted Draft, Spotted Draft Horse, Spotted Saddle, Spotted Saddle Horse, Standardbred, Sudan Country-Bred, Sudan Country-Bred Horse, Suffolk, Suffolk/Suffolk Punch/Suffolk Sorrel, Swedish Warmblood, Taishu/Tsushima, Taishuh, Tarpan, Tawleed, Tennessee Walker, Tennessee Walking Horse/Tennessee Walker, Tersk, Tersk Horse, Thessalian, Thessalian/Thessaly Horse, Thoroughbred, Thoroughbred Cross, Tibetan Pony, Tiger horse, Tokara, Tori, Tori Horse, Trakehner, Ukrainian Riding Horse/Ukrainian Saddle Horse, Ukrainian Saddle, Virginia Highlander, Vlaamperd, Vladimir Heavy Draft, Vyatka, Vyatka Horse, Walkaloosa, Warmblood, Warmblood Cross, Warmblood (All), Warmbloods of Color, Welara Pony, Welsh Cob, Welsh Pony, Weser-Em Pony, West African Barb, Western Sudan Pony, Westphalian, Wielkopolski, Wurttemberger Warmblood, Xilingol, Yakut, Yanqi, Yili, Yonaguni, Zangersheide, Zaniskari Pony, Zhemaichu, and Zorse.

[0046] In some embodiments of any of the foregoing aspects, the discipline is selected from the group consisting of barrel racing, beginner/family, breeding, brood mare, calf roping, companion only, competitive trail competitions, country pleasure, cowboy mounted shooting, cutting, draft, dressage, drill team, driving, endurance riding, English pleasure, equitation, eventing, field hunter, gaited, halter, harness, horsemanship, hunter, hunter under saddle, judged pleasure rides, jumper, lesson horse, longe-line, pleasure driving, pole bending, polo, racing, ranch horse, ranch sorting, reined cow horse, reining, rodeo, roping, showmanship, saddle seat, sidesaddle, steer wrestling, team penning, team roping, team sorting, trail horse, vaulting, Western pleasure, Western pleasure (show), Western riding, working cattle, youth/4-H horse, all around, 4-in hand driving, agility, breed shows, breeding stallion, broodmare, bull fighting, camping, cart, combined driving, cowboy dressage, cowboy racing, doma vaquero, field trials, gymkhana, harness racing, hazing, horse ball, marathon driving, mounted archery, mounted games, mounted patrol, mounted police, native costume, natural horsemanship, nurse mare, pacing, pack horse, parades, park, playday, polocrosse, ranch versatility, recipient broodmare, roadster, rodeo bronc, rodeo pickup horse, rodeo queen horse, roping, saddleseat, search and rescue, show hack, ski joring, steer roping, stock horse, sulky racing, team driving, team roping head horse, team roping heel horse, therapeutic riding, trial class competition, recreational trail riding, turnback horse, Western dressage, working equitation, hunt seat, show jumper, riding, pleasure, and bucking horse.

[0047] In some embodiments of any of the foregoing aspects, the likelihood that the offspring animal produced by each said breeding pair will have the one or more predetermined traits is at least 6.25%, 12.5%, 25%, 50%, 60%, 70%, 80%, 90%, 95%, 99%, or 100%.

[0048] In some embodiments of any of the foregoing aspects, the disease or non-disease condition is selected from a group consisting of anhidrosis, androgen insensitivity syndrome, cerebellar abiotrophy, curved ear tips, dwarfism, degenerative suspensory ligament disease, equine asthma, equine herpes virus risk, epistaxis risk, equine metabolic syndrome, laminitis, equine recurrent uveitis, equine viral arteritis susceptibility, foal immunodeficiency syndrome, gait transition, glycogen branching enzyme disorder, hereditary equine regional dermal asthenia, hoof wall separation disease, hydrocephalus, hyperkalemic periodic paralysis, immune-mediated myositis, impaired acrosomal reaction, junctional epidermolysis bullosa, kissing spines, lavender foal syndrome, lordosis, malignant hyperthermia, myotonia, navicular disease, osteochondritis dissecans, polysaccharide storage myopathy, recurrent laryngeal neuropathy, severe combined immunodeficiency, squamous cell carcinoma, tendinopathy, warmblood fragile foal syndrome, West Nile Virus susceptibility, wobbler syndrome, and behavioral abnormality. In some embodiments, the behavioral abnormality is selected from the group consisting of cribbing, teeth grinding, weaving, anxiety, depression, extreme aggression, extreme fearfulness, bucking, striking, biting, self-mutilating, and head shaking.

[0049] In some embodiments of any of the foregoing aspects, the one or more predetermined traits include at least 2 or more predetermined traits. In some embodiments, the one or more predetermined traits include at least 4 or more predetermined traits. In some embodiments, the one or more predetermined traits include at least 6 or more predetermined traits. In some embodiments, the one or more predetermined traits include at least 8 or more predetermined traits. In some embodiments, the one or more predetermined traits include at least 10 or more predetermined traits.

[0050] In some embodiments of any of the foregoing aspects, the computer-implemented database system includes genetic and non-genetic information about the non-human animal, non-human parent animal, and/or non-human offspring animal.

[0051] In some embodiments of any of the foregoing aspects, the genetic testing includes genotyping the non-human animal for any one of the following genetic markers: (a) agouti, black/red, brindle, champagne, cream, dominant, white, frame overo, grey, pearl, sabino, silver, splashed white, tobiano, and white spotting; (b) a curiosity gene that is a dopamine D4 receptor (DRD4; e.g., SEQ ID NO: 37) gene; (c) a speed gene that is a myostatin (MSTN; e.g., SEQ ID NO: 38) gene; (d) a gait gene that is a doublesex and mab-3-related transcription factor 3 (DMRT3; e.g., SEQ ID NO: 13) gene; and/or (e) a health gene selected from the group consisting of androgen receptor (AR; e.g., SEQ ID NO: 1), mutY DNA glycosylase (MUTYH; e.g., SEQ ID NO: 2), teashirt zinc finger homeobox 1 (TSHZ1; e.g., SEQ ID NO: 3), aggrecan (ACAN; e.g., SEQ ID NO: 4), family with sequence similarity 174 member A (FAM174A; e.g., SEQ ID NO: 5), interleukin 17A (IL17A; e.g., SEQ ID NO: 6), chemokine (C-X-C motif) ligand 16 (CXCL16; e.g., SEQ ID NOs: 7-11) interleukin 17B (IL17B; e.g., SEQ ID NO: 39), solute carrier family 5 member 3 (SLC5A3; e.g., SEQ ID NO: 12), glycogen branching enzyme (GBE1; e.g., SEQ ID NO: 14), peptidylprolyl isomerase B (PPIB; e.g., SEQ ID NO: 15), serpin family B member 11 (SERPINB11; e.g., SEQ ID NO: 16), beta-1,3-N-acetylgalactosaminyltransferase 2 (B3GALNT2; e.g., SEQ ID NO: 17), sodium voltage-gated channel alpha subunit 4 (SCN4A; e.g., SEQ ID NO: 18), myosin heavy chain 1 (MYH1; e.g., SEQ ID NO: 19), FKBP prolyl isomerase 6 (FKBP6; e.g., SEQ ID NOs: 20-22), laminin subunit gamma 2 (LAMC2; e.g., SEQ ID NO: 23), myosin 5A (MYOSA; e.g., SEQ ID NO: 24), equine chromosome 20 (ECA20; e.g., SEQ ID NOs: 25-28), ryanodine receptor 1 (RYR1; e.g., SEQ ID NO: 29), chloride voltage-gated channel 4 (CLCN4; e.g., SEQ ID NO: 30), glycogen synthase 1 (GYS1; e.g., SEQ ID NO: 31), equine chromosome 3 (ECA3; e.g., SEQ ID NO: 32), protein kinase DNA-activated catalytic subunit (DNAPK; e.g., SEQ ID NO: 33), damage specific DNA binding protein 2 (DDB2; e.g., SEQ ID NO: 34), procollagen-lysine, 2-oxoglutarate 5-dioxygenase 1 (PLOD1; e.g., SEQ ID NO: 35), 2′-5′-oligoadenylate synthetase 1 (OAS1; e.g., SEQ ID NO: 36), melanocyte inducing transcription factor (MITF; e.g., SEQ ID NO: 37), paired box (PAX), proto-oncogene receptor tyrosine kinase (KIT; e.g., SEQ ID NO: 40); high mobility group AT-hook 2 (HMGA2; e.g., SEQ ID NO: 42 and SEQ ID NO: 55); Zinc Finger And AT-Hook Domain Containing (ZFAT; e.g., SEQ ID NO: 43), ligand dependent nuclear receptor corepressor like and non-SMC condensing I complex subunit G locus (LCORL/NCAPG; SEQ ID NO: 41) and LIM and SH3 protein 1 (LASP1; e.g., SEQ ID NO: 44). In some embodiments, the genetic testing includes performing analysis of an entire genome of the non-human animal. In some embodiments, the analysis of an entire genome includes a genome-wide association study.

[0052] In some embodiments of any of the foregoing aspects, the non-human animal, non-human parent animal, or non-human offspring animal is selected from the group consisting of horse, cattle, sheep, dog, cat, camel, pig, goat, alpaca, donkey, llama, red fox, mouse, rat, ferret, non-human primate, rabbit, gerbil, hamster, chinchilla, or guinea pig.

[0053] In some embodiments of any of the foregoing aspects, the breeding pair includes at least 2 parent animals (e.g., at least 2, 3, or 4 parent animals). In some embodiments, the breeding pair includes 3 parent animals. In some embodiments, the breeding pair includes 4 parent animals. In some embodiments, the non-human offspring animal is produced using genetic material (e.g., DNA) obtained from one or more female parent animals and a male parent animal. In some embodiments, the genetic material is obtained from a mitochondria of the one or more female parent animals. In some embodiments, the genetic material from the mitochondria of the one or more female parent animals is used to produce the non-human offspring animal using mitochondrial transfer. In some embodiments, the genetic material is obtained from a nucleus of the one or more female parent animals. In some embodiments, the genetic material from the nucleus of the one or more female parent animals is used to produce the non-human offspring animal using nuclear transfer. In some embodiments, the non-human offspring animal is produced using in vitro fertilization procedure.

[0054] In some embodiments, the method further comprises generating a shared centimorgan (cM) value for the non-human animal or non-human offspring animal based on a sample obtained from the non-human animal or non-human offspring animal, respectively. In some embodiments, the method further comprises generating a kinship coefficient for the non-human animal or non-human offspring animal based on a sample obtained from the non-human animal or non-human offspring animal, respectively. In some embodiments, the method further comprises generating a heterozygosity score for the non-human animal or non-human offspring animal based on a sample obtained from the non-human animal or non-human offspring animal, respectively. In some embodiments, the method further comprises generating an inbreeding coefficient (F) for the non-human animal or non-human offspring animal based on a sample obtained from the non-human animal or non-human offspring animal, respectively. In some embodiments, the method further comprises performing a breed composition analysis on a sample from the non-human animal or the non-human offspring animal. In some embodiments, the method further comprises performing an identity-by-descent analysis on a sample from the non-human animal or the non-human offspring animal. In some embodiments, the sample is a biological sample (e.g., biopsy, such as, e.g., fresh frozen or formalin-fixed paraffin embedded tissue), blood, serum, plasma, urine, sputum, nail/hoof clippings, hair follicles, cell-free fetal DNA, mitochondria, a gamete (e.g., oocyte or spermatozoon), or an embryo of the offspring animal implanted, e.g., as part of an in vitro fertilization (IVF) procedure).

### BRIEF DESCRIPTION OF THE DRAWINGS

[0055] FIGS. 1A-1U show examples of a computer-implemented user interface of the present disclosure for use in producing, procuring, and/or identifying a non-human animal (e.g., a horse) with one or more predetermined traits. (FIG. 1A) Exemplary image of a front end of a webpage-instantiated user-interface useful for identifying or producing horses having one or more predetermined traits. The webpage presents a user with an option to identify existing horses having one or more predetermined traits that are catalogued in a computer-implemented database system of the disclosure (i.e., “Find a horse”) or to produce a horse having the one or more predetermined traits by identifying a breeding pair capable of producing the horse (i.e., “Build a horse”). (FIG. 1B) Exemplary image of a webpage-instantiated user interface designed to assist a user in finding an existing horse with a desired phenotype. This feature allows a user to select a gender of a horse (e.g., “Any,” “Gelding,” “Mare,” or “Stallion”), age, a gene pool from which the desired horse or a breeding pair originates (see FIG. 1D), specific behavioral abilities (i.e., traits) desired in the horse such as, e.g., speed, temperament, gait (see FIG. 1E) and color and/or color modifier (see FIG. 1F and FIG. 1H), features (e.g., breed and discipline; FIG. 1F and FIG. 1I), and health (e.g., disease or non-disease conditions that are undesired in the animal; see FIG. 1F and FIG. 1J). (FIG. 1C) Exemplary image of a webpage-instantiated user-interface designed to assist a user in “building” (i.e., producing) a horse having a desired phenotype. Similar to the “Find a horse” feature, the “Build a horse” feature allows a user to select the gene pool from which a horse is obtained and the option to buy or lease an animal (FIG. 1D), select a specific horse catalogued in the database system of the disclosure (FIG. 1G), select the abilities desired in the horse, (FIG. 1E), coat color or coat color modifier (FIG. 1H), features (FIG. 1I), and health (e.g., disease or non-disease conditions that are undesired in the animal; FIG. 1J). (FIG. 1K) Exemplary list of abbreviated horse profiles identified using the “Find a horse” feature by choosing a specific set of selection criteria for different traits of interest. (FIG. 1L) Example of an expanded animal profile of a horse (“Spooks Gotta Whiz”) identified using the computer-implemented user interface. The animal profile provides information pertaining to the genotype of the animal (A/A, E/E, W20/n, SW1/n, SW2/n, nd1/nd2), temperament [DNA](curious), gait/DMRT3 (non-gaited), speed (mid-distance), temperament (3/10), height (N/A; generally measured in number of hands), discipline (reining), color (Bay), markings (overo), location, owner information, and parents of the animal. (FIG. 1M). Exemplary list of potential breeding pairs and their abbreviated profiles identified using the computer-implemented user interface that are capable of producing a foal having a predetermined phenotype. In this case, a specific horse (i.e., Inferno Sixty-Six) was selected as a specific horse to be one member of a breeding pair with other horses catalogued in the database. (FIG. 1N) Example of an expanded profile of a selected breeding pair identified using the computer-implemented user interface. Information is provided pertaining to the speed, temperament, gait, genetic profile, appearance, and names of each of the mare and stallion in the selected breeding pair. (FIG. 1O) Example of a summary report of a potential foal produced by selecting one or more predetermined traits desired in the foal and selecting a breeding pair capable of producing a foal having the one or more predetermined traits. In this case, the foal was produced by selecting the breeding pair identified in FIG. 1N. A probability matrix provides a summary of the probabilities of the foal having a specific coat color, speed, temperament, gait, and possible health issues. (FIG. 1P) Example of a Trending Presets feature showing multiple categories of searches (i.e., builds) queried by users of the computer-implemented user interface system from which a particular user may select instead of creating a custom build. Exemplary Trending Presets include, but are not limited to, “Most popular searches for June 2019,” “What are the locals searching for,” “Tobiano is trending now,” “Child friendly,” “Breeding favorites,” “Buy them all,” “Champagne,” “5 Star Show Jumpers,” and “Clean Testing Sale Horses.” (FIG. 1Q) Example of a user profile generated on the computer-implemented user interface. The user interface allows the user to provide summary information about horses owned by the user, username, location, and user photo. (FIG. 1R) Example of an online portal of the user interface that allows the user to order genetic diagnostic tests for one or more horses. (FIG. 1S) Example of a summary page containing a list of genetic diagnostic tests ordered and/or performed on one or more horses by a specific user. (FIG. 1T) Example of a Sample Submission Form used to request genetic diagnostic tests for a horse using the computer-implemented user-interface. (FIG. 1U) Example of a genetic profile of a horse produced by requesting genetic testing using the database system of the disclosure.

[0056] FIGS. 2A-2C show examples of a computer-implemented user interface of the present disclosure for use in genetically modifying a horse (FIG. 2A) by selecting a trait from a trait category (e.g., coat color, health, or abilities) that is desired for modification, such as, e.g., avoiding a disease condition (e.g., Glycogen Branching Enzyme Deficiency; FIG. 2B), presenting with a specific coat color modifier (e.g., Champagne (CH/CH or CH/n); FIG. 2C).

[0057] FIGS. 3A-3D show examples of an Ancestry Report generated for a horse (“Cruising”) using the database system of the disclosure. (FIG. 3A) Geographical distribution of ancestral breeds (i.e., Thoroughbred, Carriage Horse, British Isles Native/Exmoor, European Heavy Horse, Iberian, and North Sea) identified for Cruising by generating an ancestry report using the database system of the disclosure. (FIG. 3B) Pie chart showing percentages of different ancestral breeds identified for Cruising using the database system of the disclosure. (FIG. 3C) Genetic composition key for FIG. 3A and FIG. 3B. (FIG. 3D) Graph representing the results of a principal component analysis (PCA) performed on Cruising by comparing Cruising's genealogy to a known reference population of horses. The reference horses represent the genomes of different “breeds” and regions throughout the world. Horses from each region of the world, group, or “breed” have genes in common and overlapping regions that can be identified, compared, and graphically visualized. Registries, breeds, or closed groups of horses bred through longer periods of history show more clearly defined clusters.

[0058] FIG. 4 shows an exemplary parentage report generated for a subject horse using the database system of the present disclosure.

[0059] FIG. 5 shows a schematic of an exemplary workflow utilizing the computer-implemented database system of the disclosure to produce or identify a non-human animal having one or more predetermined traits (i.e., a desired phenotype).

[0060] FIG. 6 shows an estimated inbreeding coefficient for a foal produced from a known sire (Charley Horse) and dam (Zema Gemmy). The bell curve represents a range of likely inbreeding coefficients for prospective foals that could be produced from Charley and Zema.

[0061] FIG. 7 shows an instantiation of the computer-implemented, web-based user interface that allows a user to view the profile of a specific animal (“Golden Opportunity”), including information about the animal's genetic profile, temperament, gait, and speed and to order an Ancestry Report (see top right of page) for the animal, as described herein.

[0062] FIGS. 8A-8E show examples of an Ancestry Report generated for a horse (“Spooks Gotta Whiz” or “Spooks”) using the database system of the disclosure. (FIG. 8A) Geographical distribution of ancestral breeds (i.e., Thoroughbred, Carriage Horse, European Heavy Horse, Iberian, North Sea, Exmoor, and Near East) identified for Spooks by generating an Ancestry Report using the database system of the disclosure. (FIG. 8B) Pie chart showing percentages of different ancestral breeds described in FIG. 8A identified for Spooks using the database system of the disclosure. (FIG. 8C) Genetic composition key for FIG. 8A and FIG. 8B. (FIG. 8D) Results of breed composition analysis showing the percent composition of the various ancestral breeds identified from a genetic sample obtained from Spooks Gotta Whiz. (FIG. 8E) Graph representing the results of a PCA performed on Spooks Gotta Whiz by comparing the horse's genealogy to a known reference population of horses. The reference horses represent the genomes of different “breeds” and regions throughout the world. Horses from each region of the world, group, or “breed” have genes in common and overlapping regions that can be identified, compared, and graphically visualized. Registries, breeds, or closed groups of horses bred through longer periods of history show more clearly defined clusters.

### DEFINITIONS

[0063] As used herein, the term “breeder animal” refers to a non-human animal (e.g., a horse) used for breeding. Accordingly, a breeder animal may be one that is used for breeding using conventional means, such as, e.g., mating a male breeder animal with a female breeder animal. Alternatively, a breeder animal may be one that is used as a donor of genetic material (e.g., sperm, egg, or mitochondria of the breeder animal) for the purpose of producing an offspring animal having one or more predetermined traits in the absence of physical mating with another breeder animal. In cases where an offspring animal is produced without requiring mating between two breeder animals, the genetic source material may be obtained and used from a single breeder animal or in combination with genetic material from one or more additional breeder animals. Additionally, a breeder animal may be a living animal or a deceased animal. In the case of a deceased animal, genetic material is obtained from the animal antemortem and cryopreserved for later use in producing an offspring animal having one or more predetermined traits.

[0064] As used herein, the term “breeding pair” corresponds to two or more non-human parent animals that are of the same species and that are capable of producing an offspring animal. Generally, a breeding pair includes two parent animals—a male and a female parent animal. However, recent advances in molecular genetics have enabled the creation of offspring animals having more than two parents. In such cases, the offspring animal could be produced, e.g., by using mitochondrial transfer, which involves removing the mitochondria of an oocyte from a first female parent and combining the oocyte with a spermatozoon from a male parent and mitochondria containing mitochondrial DNA from a second female parent to produce a fertilized egg that contains genetic information from three distinct parental sources. In another example, an offspring animal can be produced, e.g., by using nuclear transfer, which involves inserting the nucleus from an oocyte of a first female parent to an enucleate oocyte from a donor animal and combining the nucleated oocyte with a spermatozoon from a male parent to produce a fertilized egg containing genetic information from three distinct parental sources (the third parental source being the mitochondrial nucleic acid provided by the donor oocyte). Thus, a “breeding pair” may include, e.g., 3 parent animals. Furthermore, a fertilized egg produced using a mitochondrial or nuclear transfer method described above may be further modified by introducing one or more heterologous donor polynucleotides (e.g., a transgene) from a fourth genetic source (e.g., a fourth “parent”). In such instances, the term “breeding pair” may include, e.g., 4 parent animals. In cases where an offspring animal is produced using genetic source material from one or more parent animals without the requirement for physical mating between the parent animals, the genetic source material may be obtained from a living or deceased animal. In the case of a deceased animal, genetic material can be obtained from the animal antemortem and cryopreserved for later use in producing an offspring animal having one or more predetermined traits.

[0065] As used herein, the terms “database” and “database system” refer to an organized collection of related data stored digitally on a computer system (e.g., a non-transitory storage medium). In the context of the present disclosure, a database system may store information (e.g., genetic and non-genetic information) about a plurality of non-human animals pertaining to one or more predetermined traits. The database system may be part of a larger computer software system that allows a user to engage with one or more databases (e.g., by way of a computer-implemented graphical user interface, as is disclosed herein). Information in the database system may be queried by a user by providing input information pertaining to a specified set of selection criteria (e.g., one or more predetermined traits desired in a non-human animal) set by the user utilizing a graphical user interface. The database system may be configured for interrogation by a user to perform functions such as, e.g., adding, removing, modifying, and retrieving data (e.g., data about a non-human animal pertaining to one or more predetermined traits) within the system. Database systems may be physically instantiated on database servers that store the database information and accessed by a user by way of a graphical user interface.

[0066] As used herein, the term “donor polynucleotide” refers to a heterologous polynucleotide (e.g., a transgene or a segment thereof) that may be inserted into a targeted genomic locus as part of a gene editing effort using, e.g., transcription activator-like effector nuclease (TALEN), zinc finger nuclease (ZFN), or clustered regularly interspaced short palindromic repeats (CRISPR)-Cas technology. The donor polynucleotide may contain a segment of a gene targeted for modification. For example, a naturally-occurring variant of a gene may contain a deleterious mutation or polymorphism that would benefit from gene editing to restore the normal function of the affected gene. Thus, the donor polynucleotide may include a segment of the target gene that, when integrated into the target gene locus, restores the normal function of the gene.

[0067] As used herein, the term “embryonic development” refers to a biological process by which an embryo of a non-human animal grows and develops during prenatal (e.g., pre-birth) development. Generally, embryonic development proceeds in successive stages, wherein the process starts with the fertilization of an egg cell (i.e., ovum) with a sperm cell (i.e., spermatozoon) to produce a diploid zygote. Following a series of mitotic cell divisions, the zygote forms into a multicellular embryo. Cell division is succeeded by formation of a blastula, which then becomes a blastocyst. Further development of the blastocyst leads to the formation of the germ layers in a process known as gastrulation. Subsequent stages of embryonic development include formation of the nervous system, organs, and somites.

[0068] As used herein, the term “endogenous,” as it applies to a gene in a non-human animal, refers to the property of the gene being intrinsically expressed in one or more cell types of the animal.

[0069] As used herein, the term “expression” refers to one or more of the following events: (1) production of an RNA primary transcript from a DNA sequence by transcription; (2) processing of an RNA transcript into mature mRNA (e.g., by splicing, editing, 5′ cap formation, and/or 3′ end processing); (3) translation of an mRNA into a polypeptide or protein; (4) post-translational modification of a polypeptide or protein; and/or (5) manifestation of a particular phenotype in a non-human animal resulting from any one of events (1)-(4).

[0070] As used herein, the term “heterologous” refers to a nucleic acid sequence that is not normally contained within a specific DNA or RNA molecule, not normally expressed in a cell (e.g., a mammalian cell), and/or is not normally found occurring in nature. As used herein, a heterologous nucleic acid may, for example, include a promoter sequence, an artificial intron, a coding or non-coding exon, a transgene, or any associated regulatory sequences individually or in combination. Furthermore, the term “heterologous” may also refer to a protein that is not normally expressed in a cell (e.g., the protein is not endogenous to the cell), a protein that has been modified in its amino acid sequence relative to an endogenous protein, and/or is not normally found occurring in nature.

[0071] As used herein, the term “interrogating,” as it applies to the computer-implemented database system of the disclosure, refers to the method steps that include, but are not limited to, selecting one or more predetermined traits desired in an offspring animal, identifying one or more breeding pairs capable of producing the offspring animal, generating a probability matrix for at least one or each of the one or more breeding pairs and displaying the probability matrix on a computer-implemented user interface, selecting, based on the probability matrix, one or more of the breeding pairs likely to produce the offspring animal having the one or more predetermined traits, and/or breeding the one or more breeding pairs to produce the offspring animal. Interrogation of the computer-implemented database system can be performed according to the methods disclosed herein using, e.g., webpage-instantiated graphical user interface displayed on a computer monitor or a handheld device.

[0072] As used herein, the term “modulate” or “modulating” refers to increasing or decreasing a value of a particular variable of interest. For example, “modulating expression” of a gene may refer to increasing or decreasing the expression of a gene relative to a reference value (e.g., baseline expression level of the gene (e.g., an endogenous gene)). An increase in the value of a variable may be an increase by 1%, 5%, 10%, 20%, 30%, 40%, 50%, 100%, 200%, 300%, 400%, 500%, 1000%, or more. A decrease in the value of a variable may be a decrease by 1%, 5%, 10%, 20%, 30%, 40%, 50%, 60%, 70%, 80%, 90%, or 100%.

[0073] As used herein, the term “mutation” refers to a change in the nucleotide sequence of a gene. Mutations in a gene may occur naturally as a result of, for example, errors in DNA replication, DNA repair, irradiation, and exposure to carcinogens, or mutations may be induced as a result of administration of a transgene expressing a mutant gene. Mutations may result, e.g., from a single nucleotide substitution or deletion, inversion, duplication of a single nucleotide or of a contiguous sequence of nucleotides.

[0074] As used herein, the term “non-genetic assessment” refers to an analysis of a non-human animal based on non-genetic information about the animal. Because not all phenotypic traits can be accounted for by genes alone, and because phenotypic traits often result from interactions between genes and the environment, a holistic phenotypic analysis of an animal may also rely on non-genetic information alone or in conjunction with genetic information. Non-limiting examples of non-genetic assessment include phenotypic analysis of a non-human animal based on information gathered from someone knowledgeable about the animal (e.g., owner, breeder, caretaker, or seller) using a questionnaire, information gathered from sporting or competition events (e.g., score cards based on standardized marking systems used in formal animal sporting or competition events), information gathered from veterinary assays (e.g., blood analysis measuring, e.g., blood sugar levels, blood urea nitrogen, amylase, total calcium, X-rays, CAT scans, PET scans, and conformational and physiological parameters).

[0075] As used herein, the term “polymorphism” refers to a simultaneous occurrence in the same population of two or more alleles at a particular genetic locus, with each allele occurring at a particular frequency (usually above 1%). Non-limiting examples of a polymorphism include single nucleotide polymorphism (SNP), restriction fragment length polymorphism (RFLP), amplified fragment length polymorphism (AFLP), insertion-deletion polymorphism (INDEL), random amplified polymorphic DNA (RAPD), and a simple sequence conformation polymorphisms (SSCP), among others.

[0076] As used herein, the term “producing,” as it applies to a non-human offspring animal (e.g., a horse), refers to a method of creating the offspring animal using genetic and/or non-genetic information from one or more parent animals (e.g., a stallion and/or one or more mares). The offspring animal may be produced by breeding e.g., physically mating) a male and a female parent animal. Alternatively, the offspring animal may be produced using a combination of in vitro fertilization (IVF) and mitochondrial or nuclear transfer. In such cases, an offspring animal may be produced using genetic material (e.g., DNA) from one or more parent donor animals. For example, an offspring animal may be produced by removing the mitochondria of an oocyte from a first female parent animal, artificially fertilizing the oocyte with a spermatozoon from a male parent animal, and artificially introducing a mitochondrion (or mitochondria) from a second female parent animal into the fertilized oocyte. In another example, an offspring animal can be produced, e.g., by using nuclear transfer, which involves artificially introducing a nucleus from a female parent animal to an enucleated donor oocyte from a related female animal and fertilizing the oocyte with a spermatozoon from a male parent, animal.

[0077] As used herein, the term “trait” means a characteristic of an organism which manifests itself in a phenotype, and refers to a biological, behavioral, or any other measurable characteristic(s), which can be any variable that can be quantified in or from a biological sample or organism, which can then be used either alone or in combination with one or more other quantified variables to characterize an animal. Many traits are the result of the expression of a single gene, but some are polygenic, i.e., they result from coordinated expression of more than one gene. A “phenotype” is an outward appearance or other measurable characteristic of an organism. Many different traits can be inferred by the methods disclosed herein. As used herein, a trait may be “predetermined” if the expression of the trait was selected for by a user (e.g., animal owner, breeder, caretaker, seller, or buyer) using the methods and systems of the present disclosure. Non-limiting examples of predetermined traits include coat color, coat color modifier, coat texture, coat thickness, facial marking, leg marking, eye color, skin color, mane color, tail color, speed, gait, temperament, and health.

[0078] As used herein, the term “non-human animal” refers to any non-human mammal, including cattle, sheep, dog, cat, camel, pig, goat, alpaca, donkey, llama, red fox, mouse, rat, ferret, non-human primate, rabbit, gerbil, hamster, chinchilla, or guinea pig, among others. A non-human animal may refer to a companion animal, a farm animal, or an animal used for leisure or sporting activities. Furthermore, a non-human animal may be an offspring animal or a parent animal (e.g., male parent or female parent).

[0079] As used herein, the term “probability matrix” refers to an array of probability values pertaining to the likelihood of a non-human animal (e.g., a non-human offspring animal) having one or more predetermined traits. The array of probability values may include individual probability values corresponding to the likelihood of expression of a specific predetermined trait in the non-human animal.

[0080] As used herein, the terms “user interface” and “graphical user interface” refer to a component of a computer software program instantiated on a general-purpose computer or an electronic hand-held device that allows a user to engage with a computer program (e.g., a software program) to achieve a specific goal (e.g., producing an offspring animal having one or more predetermined traits). The user interface may be part of a larger system containing a database system and subsystems (such as, e.g., a database system disclosed herein), as well as engines for searching, comparing, saving, exporting, and transforming information using a variety of mathematical operations (e.g., statistical analysis). A user interface generally requires the user to provide one or more inputs (e.g., one or more predetermined traits desired in the offspring animal), which the interface routes to the appropriate software system (e.g., database and/or engine) or subsystem. The user interface may then receive and display output information (e.g., a probability matrix containing an array of probability values pertaining to the likelihood of the offspring animal having one or more predetermined traits) to the user based on the processing of the provided inputs by the appropriate systems. The user interface may include systems that are functionally connected to physical input hardware such as a peripheral device, such as a keyboard and a mouse, and output hardware, such as a display monitor, speakers, and printer(s).

### DETAILED DESCRIPTION

[0081] The disclosure generally relates to methods and computer-implemented systems (e.g., a database system and a graphical user interface) for producing, procuring, and/or identifying a non-human animal or offspring thereof having one or more predetermined traits (e.g., traits associated with physical appearance, morphology, health, and performance, among others). In particular, the present disclosure provides computer-implemented databases containing information associated with one or more predetermined traits (e.g., genetic and non-genetic information) for use in calculating a probability of producing a non-human animal having one or more predetermined traits. The methods and computer-implemented systems disclosed herein are also useful for selecting one or more predetermined traits of a non-human animal, identifying potential breeding pair matches capable of producing the animal having the traits of interest, identifying potential health risks associated with the selection of those traits, identifying existing animals having one or more traits of interest that are for sale or lease, and/or identifying animals that are available for stud service. The disclosed methods and systems are also applicable for the production of transgenic non-human animals having one or more predetermined traits of interest. The disclosed methods may be used for assessing the health, behavior, performance, predispositions, and/or monetary value of an animal. Such information may be particularly useful in making decisions pertaining to breeding, purchasing, medical treatment, and destiny determination (e.g., discipline) of the animal.

[0082] The sections that follow describe the methods and computer-implemented systems useful for producing a non-human animal or offspring thereof having one or more predetermined traits in detail. While the descriptions below are directed towards horses, the present disclosure can also be used with other non-human animals including, but not limited to cattle, sheep, dogs, cats, camels, pigs, goats, alpacas, donkeys, llamas, red foxes, mice, rats, ferrets, non-human primates, rabbits, gerbils, hamsters, chinchillas, or guinea pigs, among others.

### Computer-Implemented Database System

[0083] The present disclosure provides a database system for storing, analyzing, retrieving, and updating information about multiple non-human animals (e.g., horse, cattle, sheep, dog, cat, camel, pig, goat, alpaca, donkey, llama, red fox, mouse, rat, ferret, non-human primate, rabbit, gerbil, hamster, chinchilla, or guinea pig, among others) having one or more predetermined traits. The database system can include a variety of system components (e.g., subsystems). Information about the non-human animal can be stored in the various datasets of the system, categorized according to the source and/or type of information, and partitioned into unique database subsystems. An exemplary database subsystem can include a dataset of non-human animals having a specific genetic profile associated with one or more predetermined traits (e.g., a genetic profile subsystem) and characterized by, for example, expression of a specific gene(s) or lack thereof, presence or absence of a specific variant of a gene(s) (e.g., a gene having a single nucleotide polymorphism (SNP)), presence or absence of genetic mutations (e.g., indels, substitutions (transitions, transversions, silent, missense, or nonsense), duplication, repeat expansion, or frameshift). A separate database subsystem can contain information about the animal gathered from one or more secondary sources (e.g., a secondary source information subsystem).

### Use of the Database System to Produce a Non-Human Animal Having One or More Predetermined Traits

[0084] The present disclosure provides methods for using genetic and non-genetic information about one or more non-human animals that have been integrated into a database that can be interrogated in order to assist in the production of an offspring animal having one or more predetermined traits. Such methods can be used to inform breeding cross-match evaluations, in which a breeding pair is selected based on genetic and non-genetic information in order to produce an animal having one or more desired physical characteristics, behavioral characteristics, and/or predispositions. For example, horse enthusiasts have historically selected for specific traits in their foals by making breeding decisions based on information relating to the pedigree, fitness, appearance, health, and behavior of the stallion and mare. Accordingly, the breeder would optimize the odds of achieving the target phenotype (e.g., one or more desired traits) in the foal by selecting a breeding pair capable of producing the desired phenotype. This strategy is encumbered by various sources of error that introduce uncertainty of achieving the target phenotype in the foal. For example, breeding decisions based on pedigree have long been made on the basis of self-reported testimony of the horse seller and/or based on an assumption that the foal inherits 50% of its genetic information from each parent. There are at least two problems with this approach, namely that (1) pedigree assignments based on presumed genetic inheritance often underestimate the degree of genetic relatedness (i.e., inbreeding) between the stallion and the mare; and (2) small changes in genotype can produce profound changes in phenotype, thus potentially confounding the initial judgment of the breed of the stallion and/or mare.

[0085] Presently, horse breeders rely on biomechanical, geometric, and physiological criteria to evaluate young adult horses for their inherited potential to fulfill a specialized discipline (e.g., performance racing). The size and relative positions of major muscles in the fore and hind limbs can be measured to estimate stride power. Slow-motion videography can be utilized to evaluate the efficiency of a horse's gait. Blood pressure and ultrasound can be used to determine heart size, thickness, and stroke volume. Because the phenotype of an adult horse depends on the interaction of its genotype and environment, an adult phenotype does not reliably provide an accurate prediction of the horse's genetic potential. In addition, parental phenotype is a poor predictor of offspring genotype. Phenotypically superior horses often produce below-average foals, demonstrating the limitations of relying on phenotypic analysis and performance or pedigree records such as stud books or race results alone in predicting the foal's ultimate phenotype. In the absence of performance records, prospective purchasers rely largely on pedigree and physical conformation to select animals which they consider to have potential for specific disciplines. At a young age, a horse is still growing and developing, and, thus, its physical conformation may not accurately predict its adult physical capacity and its performance. Therefore, the value of breeding decisions based on parental phenotype could only be ascertained after the animal enters into the productive phase of its life and has received sufficient training. The absence of predictive information about the foal's ultimate phenotype prior to its productive phase substantially increases the risk and cost associated with a potentially unfavorable outcome.

[0086] Genetic profiling has also been employed for the purpose of selective breeding of horses that excel at specific skills. However, such efforts have been targeted almost exclusively at improving athletic performance (e.g., speed), typically by selecting for specific variants of single genes (e.g., the MSTN gene; see, e.g., Hill et al. Recent Patents on DNA & GENE Sequences 6: 203-8, 2012 and Schröder et al. Vet. J. 190: 39-48, 2011). The present disclosure improves on such approaches by providing a holistic approach for identifying or producing a non-human animal having a desired phenotype by providing an integrated database system capable of analyzing and correlating an unprecedented number of genetic and non-genetic characteristics in order to produce a desired phenotype in the animal with a high probability. Such a database system combines, stores, organizes, and correlates vast quantities of disjointed genetic and non-genetic information pertaining to one or more physical and/or behavioral traits, which a user can then leverage and interrogate using a computer-implemented user interface system to select a desired phenotype of the subject animal and produce such an animal with high certainty.

[0087] Methods disclosed herein address the problem faced by animal breeders discussed above by increasing the likelihood of producing an offspring animal (e.g., a foal) having one or more (and typically multiple) desirable characteristics by drawing from multiple sources of information integrated within a single user-friendly platform that may be instantiated, for example, as an online computer-implemented user-interface system in communication with a computer-implemented database system, as is described herein. The user platform may be part of a larger computer-implemented system that includes a remote graphical user interface, one or more digital database systems having one or more database subsystems, one or more engines for searching, comparing, storing, and manipulating information (e.g., through mathematical operations such as, e.g., statistical analysis), and computer hardware (e.g., local or remote) to implement the platform, as described in detail below. The user may be any party interested in producing, procuring, and/or identifying a non-human animal (e.g., horse, cattle, sheep, dog, cat, camel, pig, goat, alpaca, donkey, llama, red fox, mouse, rat, ferret, non-human primate, rabbit, gerbil, hamster, chinchilla, or guinea pig, among others) such as, for example, an animal owner, breeder, seller, caretaker, or first-time buyer.

[0088] Thus, the disclosed methods and systems may be applied to produce a non-human offspring animal (e.g., a foal) having one or more predetermined steps according to the following methods. First, a user (e.g., animal owner, breeder, caretaker, seller, or buyer) may use a computer-implemented user interface disclosed herein to select one or more predetermined traits desired in the offspring animal using a computer-implemented database system that includes genetic and non-genetic information about the offspring animal or one or more (e.g., 1, 2, 3, or more) parents of the offspring animal. The user may then interrogate the database system to identify one or more (e.g., 1, 2, 3, 4, 5, 6, 7, 8, 9, 10, or more) breeding pairs (e.g., a breeding pair having at least a first and a second parent animal of the same type) capable of producing the offspring animal. The user may also specify the sex, breed, and/or discipline of at least the first parent animal and/or the second parent animal of the offspring animal. The user may then use the computer-implemented database system to generate a probability matrix for each of the one or more breeding pairs, such as a probability matrix that includes an array of probability values (e.g., at least 6.25%, 12.5%, 25%, 50%, 60%, 70%, 80%, 90%, 95%, 99%, or 100%) pertaining to the likelihood that the offspring animal produced by each said breeding pair will have the one or more predetermined traits. As a subsequent step, the user may select, based on the array of probability values of the probability matrix, one or more of the breeding pairs likely to produce the offspring animal having the one or more predetermined traits. The user may then elect to breed one or more of the selected breeding pairs to produce the offspring animal (e.g., a breeding pair with a probability value above a threshold value, such as a threshold value of at least 50% (e.g., at least 60%, 70%, 80%, 90%, 95%, or 99%, or greater such as 100%)). Genetic testing may be performed on the offspring animal to detect the presence of the one or more predetermined traits. If the offspring animal is identified as lacking one or more of the predetermined traits, e.g., based on the results of the genetic testing, the offspring animal lacking the one or more predetermined traits may be genetically modified to promote or improve expression of the one or more predetermined traits, as is discussed in detail below. For example, the genetic testing in the offspring animal at an early stage, such as during embryonic development, 3-60 days after conception, or one day to four years after birth. The user may further elect to continue with the birthing the offspring animal. The user may perform further genetic or non-genetic testing on the animal one or more times to confirm the presence of the one or more predetermined traits in the offspring animal, such as after birth. Upon confirming the presence of the one or more predetermined traits in the offspring animal, the user may register the offspring animal determined to have the one or more predetermined traits in the database system, for example, as a breeder animal.

### Production of Non-Human Animals for a Specific Discipline

[0089] In the context of producing a horse, but also applicable to other non-human animals of interest, the user may desire to increase the likelihood of the offspring animal having one or more traits to achieve a phenotype suitable for one or more disciplines (e.g., such as one or more disciplines disclosed herein). In the context of horses, a discipline generally refers to one of multiple equestrian sports requiring a particular set of skills from the horse and the rider. A horse having one or more traits suitable for a particular discipline may compete in such sporting events to display the horse's and the rider's skills at that discipline. These disciplines could be used as a selection criterion in the database system, thereby allowing a user to select a desired discipline for an offspring animal. Interrogation of the database system using this selection criterion would identify possible parental animals that could be bred to produce an offspring animal that excels at the desired discipline by specifying that at least one of the parent animals in a breeding pair excel at the discipline or possesses traits that, when combined with other specifically selected traits in a second parent animal, would have a high probability of producing an offspring animal that excels at the desired discipline.

[0090] In a particular example, a user interested in producing, procuring, or identifying a non-human animal (e.g., a horse) suitable for a specific discipline, such as, e.g., roping, may select roping as a discipline at which the one or more parent animals excel at using the computer-implemented systems of the disclosure. Information pertaining to a discipline that one or more parent animals excel at may be obtained through self-reported testimony from someone familiar with the animal (e.g., an owner or a caretaker) or the information may be obtained from an ancestry report (e.g., an ancestry report described herein) that indicates a favorable likelihood that an offspring animal generated by breeding one or more parent animals that excel at the desired disciplines will also excel at that discipline. The system would then produce a list of animals exhibiting the selected discipline. The system may allow the user to select an option to buy or lease one or more of these animals, or the user could, e.g., select one or more of these animals as parent animals that could be bred to produce an offspring animal. The system may also produce a probability matrix showing the likelihood that breeding two parental animals would produce an offspring animal exhibiting the selected discipline. A detailed list of discipline selections that can be made by a user of the database system is described below.

[0091] For example, a user wishing to identify or produce a horse with a proficiency trait, such as, e.g., Show Jumper, the horse will be selected to express at least one endurance-type MSTN gene variant (“T”), at least one medium-tall height gene variant (LCORL=ATTT.C), be negative for tendinopathy, recurrent laryngeal neuropathy, negative for the DMRT3 gene, and positive for at least one vigilance trait. The user can use the above factors as selection criteria via the user interface of the disclosure to identify an existing animal having the above phenotype or to identify a breeding pair capable of producing an offspring animal having the above phenotype. The database system may then employ its search and compare engines to identify horses having the above-described genotype or to identify one or more breeding pairs capable of producing an offspring animal having said genotype.

### Information Stored in the Database

[0092] A. Genetic Information

[0093] Multiple sources of information may be used in the systems and methods of the present disclosure to produce a non-human animal having one or more predetermined traits. Among these sources, genetic information about the animal may be a critical factor in determining its ultimate phenotype. Without wishing to be bound by any theory, expression of one or more predetermined traits in the non-human animal may result from expression of one or more genes. Thus, the present disclosure provides methods for using genetic information to increase the likelihood of producing a non-human animal having one or more predetermined traits. The present disclosure also provides methods of using genetic information to produce a composition analysis for a non-human animal that assists in determining ancestral breed composition as well as parentage determination. The genetic basis for a large number of animal traits, predisposition for physical skills, and disease conditions has been established to date, as is well-known in the art, and this information can be incorporated into the system database and interrogated by a user to establish, e.g., a probability matrix, as described herein, which can be used to produce an offspring animal.

[0094] a. Genetic Markers of Physical Traits

[0095] The presence of genes or gene variants that effect coat color and markings in horses can be tested and verified using methods described herein and known in the art. This information can be included in the database system and interrogated in order to produce a probability matrix, as is described herein. Patterns and color of facial markings in horses may also be genetically determined. These patterns and markings can be reported in the database for each reference animal and can be used as a selection criterion for the desired offspring animal. Furthermore, genetic information about the color of leg markings may be employed using the methods of the disclosure. Leg markings can be reported in the database for each reference animal and used as a selection criterion for the desired offspring animal.

[0096] Conformation is yet another physical trait that may be predicted through genetic profiling of an animal in accordance with the methods disclosed herein. Conformation deals with the physical attributes of the animal (e.g., a horse) and encompasses dimensions such as bone structure, musculature, and body proportions in relation to each other and the intended use of the animal. Conformation attributes can also be reported in the database for each reference animal and used as a selection criterion for the desired offspring animal. For example, a horse that is intended for use as a draught animal would require a different conformation than one intended for use as a jumper or a cutting horse. Conformational traits may be measured in angles for shoulder, hip and neck set, as well as back length, leg length, pastern length and angle, height and weight, head and ear shape, musculature, hoof shape and hardness, and shoulder versus hip height, among others. In selecting for conformational traits, the user may need to take caution to avoid co-selecting for undesired genetic diseases that may be genetically linked. For example, Boyko et al. (Boyko et al. BMC Genomics 15:259, 2014; incorporated by reference herein in its entirety) have used genome-wide association analysis to establish an association between equine recurrent laryngeal neuropathy, also known as “roaring,” and horse height and body size, traits genetically linked to the LCORL/NCAPG locus on equine chromosome 3 (ECA3). The present disclosure addresses this problem by providing probability estimates for the likelihood of developing a genetic disease condition based upon the selection of one or more predetermined traits of the animal. For example, such estimates may be determined by performing genetic testing on the non-human animal to identify gene variants associated with an increased probability of having a particular disease or non-disease condition. In some cases, a disease or non-disease condition in a non-human animal (e.g., a horse) may be associated with multiple SNPs within a particular gene locus, such as, e.g., the disease or non-disease conditions and corresponding SNPs of Table 1, as is shown below.

TABLE 1
Disease or non-disease conditions in horses associated with multiple single nucleotide polymorphisms

| | Disease | | | | | | Publica- | | | | Alter- | | |
|---|---|---|---|---|---|---|---|---|---|---|---|---|---|
| Number | or non- | | | | | | tion | Refer- | | Alter- | native | | |
| of | disease | Trait | Relia- | Trait | | | (PubMed | ence | Reference | native | pheno- | SNP | Nucleic acid sequence |
| loci | condition | category | bility | symbol | Breeds | Gene | ID) | allele | phenotype | allele | type | Name | containing multiple SNPS |
| 2 | Suscepti- | Disease | HIGH | EAV | Multi- | CXCL16 | 27930647 | A | Resistant | T | Suscep- | CXCL16- | AGGTGAGAGGCTGCGATGGGGC |
| | bility or | Risk | | | ple | | | | | | tible | EAVRS1- | GGTGGGTTGGAGGCTAAGTAATA |
| | resistance | | | | | | | | | | | DIAG | GCTGGGGGAGCCCTTTGGCGTG |
| | to Equine | | | | | | | | | | | | GGAACCTGTGCAGACCGTCGCTG |
| | Arteritis | | | | | | | | | | | | TCTCTCTCAGGGGATGGCAACGA |
| | Virus | | | | | | | | | | | | GGGCAGCATCGCTGGAAGTTGTC |
| | | | | | | | | | | | | | GCTGTAATACAAGAT[A/T]TCCGT |
| | | | | | | | | | | | | | CCGACTCCCCTCCGGCGGTTGAC |
| | | | | | | | | | | | | | TTTATGGAACATTTCCGAAAACAA |
| | | | | | | | | | | | | | CTGAGAGGCTATGATCGCTGTGG |
| | | | | | | | | | | | | | TTCGTACGTCAGGTAATCTTAACC |
| | | | | | | | | | | | | | CCCCACACCCCCCACCCCGGGAA |
| | | | | | | | | | | | | | GACAGCGCCTCTGGGACCCTCTC |
| | | | | | | | | | | | | | TGGT |
| | | | | | | | | | | | | | (SEQ ID NO: 8) |
| | | | | | | | | G | Resistant | C | Suscep- | CXCL16- | CGACCAGACCCTGGTCTAGGTGA |
| | | | | | | | | | | | tible | EAVRS2- | GAGGCTGCGATGGGGCGGTGGG |
| | | | | | | | | | | | | DIAG | TTGGAGGCTAAGTAATAGCTGGG |
| | | | | | | | | | | | | | GGAGCCCTTTGGCGTGGGAACCT |
| | | | | | | | | | | | | | GTGCAGACCGTCGCTGTCTCTCT |
| | | | | | | | | | | | | | CAGGGGATGGCAACGAGGGCAG |
| | | | | | | | | | | | | | CATCGCTGGAAGTTGTCGCTGTA |
| | | | | | | | | | | | | | ATACAAGATATCCGTCCGACTCCC |
| | | | | | | | | | | | | | CTCCGGCGGTT[G/C]AC[T/G or |
| | | | | | | | | | | | | | T]TTATG[G/A]AACATTTCCGAAAA |
| | | | | | | | | | | | | | CAACTGAGAGGCTATGATCGCTG |
| | | | | | | | | | | | | | TGGTTCGTACGTCAGGTAATCTTA |
| | | | | | | | | | | | | | ACCCCCCACACCCCCCACCCCGG |
| | | | | | | | | | | | | | GAAGACAGCGCCTCTGGGACCCT |
| | | | | | | | | | | | | | CTCTGGTCAAACTTGAACTCCTTC |
| | | | | | | | | | | | | | TGGGAGGACCTAGCCCCCTCTCC |
| | | | | | | | | | | | | | GGCTTATAATTGCCCTGATTCTCC |
| | | | | | | | | | | | | | CAGTTCACCT |
| | | | | | | | | | | | | | (SEQ ID NO: 9) |
| | | | | | | | | T | Resistant | A or G | Suscep- | CXCL16- | CGACCAGACCCTGGTCTAGGTGA |
| | | | | | | | | | | | tible | EAVRS3- | GAGGCTGCGATGGGGCGGTGGG |
| | | | | | | | | | | | | DIAG | TTGGAGGCTAAGTAATAGCTGGG |
| | | | | | | | | | | | | | GGAGCCCTTTGGCGTGGGAACCT |
| | | | | | | | | | | | | | GTGCAGACCGTCGCTGTCTCTCT |
| | | | | | | | | | | | | | CAGGGGATGGCAACGAGGGCAG |
| | | | | | | | | | | | | | CATCGCTGGAAGTTGTCGCTGTA |
| | | | | | | | | | | | | | ATACAAGATATCCGTCCGACTCCC |
| | | | | | | | | | | | | | CTCCGGCGGTT[G/C]AC[T/G or |
| | | | | | | | | | | | | | T]TTATG[G/A]AACATTTCCGAAAA |
| | | | | | | | | | | | | | CAACTGAGAGGCTATGATCGCTG |
| | | | | | | | | | | | | | TGGTTCGTACGTCAGGTAATCTTA |
| | | | | | | | | | | | | | ACCCCCCACACCCCCCACCCCGG |
| | | | | | | | | | | | | | GAAGACAGCGCCTCTGGGACCCT |
| | | | | | | | | | | | | | CTCTGGTCAAACTTGAACTCCTTC |
| | | | | | | | | | | | | | TGGGAGGACCTAGCCCCCTCTCC |
| | | | | | | | | | | | | | GGCTTATAATTGCCCTGATTCTCC |
| | | | | | | | | | | | | | CAGTTCACCT |
| | | | | | | | | | | | | | (SEQ ID NO: 10) |
| | | | | | | | | G | Resistant | A | Suscep- | CXCL16- | CGACCAGACCCTGGTCTAGGTGA |
| | | | | | | | | | | | tible | EAVRS4- | GAGGCTGCGATGGGGCGGTGGG |
| | | | | | | | | | | | | DIAG | TTGGAGGCTAAGTAATAGCTGGG |
| | | | | | | | | | | | | | GGAGCCCTTTGGCGTGGGAACCT |
| | | | | | | | | | | | | | GTGCAGACCGTCGCTGTCTCTCT |
| | | | | | | | | | | | | | CAGGGGATGGCAACGAGGGCAG |
| | | | | | | | | | | | | | CATCGCTGGAAGTTGTCGCTGTA |
| | | | | | | | | | | | | | ATACAAGATATCCGTCCGACTCCC |
| | | | | | | | | | | | | | CTCCGGCGGTT[G/C]AC[T/G or |
| | | | | | | | | | | | | | T]TTATG[G/A]AACATTTCCGAAAA |
| | | | | | | | | | | | | | CAACTGAGAGGCTATGATCGCTG |
| | | | | | | | | | | | | | TGGTTCGTACGTCAGGTAATCTTA |
| | | | | | | | | | | | | | ACCCCCCACACCCCCCACCCCGG |
| | | | | | | | | | | | | | GAAGACAGCGCCTCTGGGACCCT |
| | | | | | | | | | | | | | CTCTGGTCAAACTTGAACTCCTTC |
| | | | | | | | | | | | | | TGGGAGGACCTAGCCCCCTCTCC |
| | | | | | | | | | | | | | GGCTTATAATTGCCCTGATTCTCC |
| | | | | | | | | | | | | | CAGTTCACCT |
| | | | | | | | | | | | | | (SEQ ID NO: 11) |
| 1 | Lordosis | Trait | High | L | Saddle | ECA2 | 21070278 | C | Non-risk | T | Risk | BIEC2- | GCTCCTAAAAGAGGCCCTTCCAC |
| | (congenial | Genetics | | | bred | 0 | | | | | haplo- | 632523- | ACCATCACACCAGGGTTCCTATGT |
| | swayback) | | | | | | | | | | type | L1 | GGGACTCCATTCACAGCCCACAC |
| | | | | | | | | | | | | | ATAGGAAACTGCCAGGACCATCT |
| | | | | | | | | | | | | | GTTTTTTTGTGATGATGATTCAAT |
| | | | | | | | | | | | | | GACTATTTGTTTTTCATTTTTTTCA |
| | | | | | | | | | | | | | CAACTGGTCTGTGCCTGGCAGTT |
| | | | | | | | | | | | | | GGCTGGATAACCCACCAACCACT |
| | | | | | | | | | | | | | CCTAACCCCTCT[C/T]GCTCACCT |
| | | | | | | | | | | | | | CCACTGCAGAGGCTGGAAAAGCT |
| | | | | | | | | | | | | | AATCGCTTCACCAGCCTCCCTTGC |
| | | | | | | | | | | | | | AGCTAGGGTTGAGCACATCGTATT |
| | | | | | | | | | | | | | CCCGGAACtgaggagacacaaagcac |
| | | | | | | | | | | | | | aaggacaaaaagccgaaatgctgagc |
| | | | | | | | | | | | | | agggcaaagcagaaagactgaggaca |
| | | | | | | | | | | | | | ttcccatcctcggtgtcaccgctgag |
| | | | | | | | | | | | | | ctgccagatcaacacca |
| | | | | | | | | | | | | | (SEQ ID NO: 25) |
| | | | | | | | | A | Non-risk | G | Risk | BIEC2- | TGCAGCAACAATATTTTAAGTTCC |
| | | | | | | | | | | | haplo- | 532534- | CTGATGGCTGGCATCCACCAATC |
| | | | | | | | | | | | type | L2 | TGGAGAATTTTCTATATTTGTGGC |
| | | | | | | | | | | | | | CTAAAGTTCCATAAAACATGGATA |
| | | | | | | | | | | | | | ATGACAAGTCCTCCGTGAAGATTA |
| | | | | | | | | | | | | | GGCCATTGGCTGTGGAAGGAAAT |
| | | | | | | | | | | | | | AAGCCTGAGGACTTGCCCTGCTG |
| | | | | | | | | | | | | | GGAGTGAACACTCCTGTCACAGT |
| | | | | | | | | | | | | | GCTGACTAAGCA[A/G]TACGCGAG |
| | | | | | | | | | | | | | GAACAAGAATTAATCTGTCCTCCA |
| | | | | | | | | | | | | | ACGGTGGGTaagggactcccacaaga |
| | | | | | | | | | | | | | ctacacagtgagttttagagctgggg |
| | | | | | | | | | | | | | gcagaaatcaggccctgcaactccca |
| | | | | | | | | | | | | | ggctgaggttctttcaaccaaatcac |
| | | | | | | | | | | | | | ATTCCCCTCCCCTCTACTTTGGAATT |
| | | | | | | | | | | | | | CCCCTATGAAATTAGAATTAAAAAGT |
| | | | | | | | | | | | | | TTCCCACTTCTG |
| | | | | | | | | | | | | | (SEQ ID NO: 26) |
| | | | | | | | | C | Non-risk | T | Risk | BIEC2- | agttgttaccctgaaaaacatttttg |
| | | | | | | | | | | | haplo- | 632578- | gtcttatcagtcctctatttaaaaac |
| | | | | | | | | | | | type | L3 | ctctgttggcatttcattgcttacaa |
| | | | | | | | | | | | | | gttaaaagccgaattcacactctcgg |
| | | | | | | | | | | | | | cccctctcaccccactcttctagccc |
| | | | | | | | | | | | | | ctatcctggtttccttgccccccagg |
| | | | | | | | | | | | | | atttcccatcttctgatgtgacaagc |
| | | | | | | | | | | | | | ctttttatgactcagggcc[c/t]gt |
| | | | | | | | | | | | | | tctgatttgatttctttggcccggac |
| | | | | | | | | | | | | | tgctttatttctctcctttctttctt |
| | | | | | | | | | | | | | ttgccaactaaactcacgttcttcct |
| | | | | | | | | | | | | | ttaggagccatatcaaaagtcacctc |
| | | | | | | | | | | | | | ttcagggacgtcctccctaattcttc |
| | | | | | | | | | | | | | aggcagagtgtgcagctcagccctct |
| | | | | | | | | | | | | | gtgttcccttatcctttgtggcccat |
| | | | | | | | | | | | | | ggagcttttgcatttc |
| | | | | | | | | | | | | | (SEQ ID NO: 27) |
| | | | | | | | | T | Non-risk | G | Risk | BIEC2- | ATTATGTCTAACTGTAATTTTCGAA |
| | | | | | | | | | | | haplo- | 632658- | AGCTGCTAAAATAAACATGTAGTG |
| | | | | | | | | | | | type | L4 | CTTTTGCAATAAAAAATAAACAATA |
| | | | | | | | | | | | | | AAAAGAGAGAACGAGAACGTCTA |
| | | | | | | | | | | | | | AAGAAAACAGTGAGGCAATTCGA |
| | | | | | | | | | | | | | ACCCAACCAGAGGCCCACGGCAG |
| | | | | | | | | | | | | | CATCTGGGATTACTGAGCTCTGTG |
| | | | | | | | | | | | | | ACCGACACCTAATTGGACACAGA |
| | | | | | | | | | | | | | CTGCCTAGAA[T/G]TGTCCCTCAT |
| | | | | | | | | | | | | | TTGTTTTCTGGGCAAGGCCATTCA |
| | | | | | | | | | | | | | TAAAGACTCATTACTCCAAAACAA |
| | | | | | | | | | | | | | CCAGCCCAAGAGCCCCTCAATGT |
| | | | | | | | | | | | | | CCAACTCCAGACACACGAAGGAG |
| | | | | | | | | | | | | | TAACAATGGCCAGAAAGGCCCTG |
| | | | | | | | | | | | | | AGGCTTTCTCCAGAGAACTGCAG |
| | | | | | | | | | | | | | TCACTAATCAATTCAAAGACAAAC |
| | | | | | | | | | | | | | GAGGTTTCTCCCTGTAAAGGAAAA |
| | | | | | | | | | | | | | TG |
| | | | | | | | | | | | | | (SEQ ID NO: 28) |
| 1 | Height | Trait | HIGH | H1 | Multi- | LCOR | 22806074 | T | Low risk | C | High | BIEC2- | AGTGCTAAAGAAAAGCCAAATAAC |
| | | Genetics | | | ple | L/NCA | | | | | risk | 806543- | TCATGATTGGAGTCAGTTGGGTTT |
| | | | | | | PG | | | | | | H1 | AATGCAAGTCAGTTTTGCAGAGG |
| | | | | | | | | | | | | | CAGTTTTAAAGGAGAGACATGAAT |
| | | | | | | | | | | | | | CGGCAGAAATGCCTGCCCTTCCA |
| | | | | | | | | | | | | | GTGACAATAAGTGAAAAGAGAAG |
| | | | | | | | | | | | | | CCATCTATTTGCATGTTCTTGAGA |
| | | | | | | | | | | | | | GAAACCAAATTTGCCTGGCTAGA |
| | | | | | | | | | | | | | GAAGCATTCCAG[C/T]TTATTTCT |
| | | | | | | | | | | | | | GTACCCCAAAGGCAGAATCACAGG |
| | | | | | | | | | | | | | GAACACAATAGTGCAAACTTAAAT |
| | | | | | | | | | | | | | GACAACCTCTACAAAGAATATTCC |
| | | | | | | | | | | | | | TCTCTCAACTCTCCTCTCTCTATG |
| | | | | | | | | | | | | | CTATCCGGTCAAAGCCAGAGGTG |
| | | | | | | | | | | | | | GAGAGTACCTATATGTTAATGCGT |
| | | | | | | | | | | | | | TGAATATATTAATAACAAACATTTG |
| | | | | | | | | | | | | | TTTTGAACTCCATTTTAAATTAGC |
| | | | | | | | | | | | | | (SEQ ID NO: 41) |
| | | | | H2 | | HMGA | | C | Low risk | T | High | BIEC2- | GTATTCTCGGGCAGGTTTCTTGAG |
| | | | | | | 2 | | | | | risk | 1024210- | CCATTTCTCTCAATAGCAAAACTG |
| | | | | | | | | | | | | H2 | CCTCGTGTTCCATTTTTGATTTCA |
| | | | | | | | | | | | | | GTGTTGCTTCTCTAACACATTTGA |
| | | | | | | | | | | | | | CTTTCAAGCAATATTGTTTTGCTA |
| | | | | | | | | | | | | | GCTATCATGCATCATGAccataaaat |
| | | | | | | | | | | | | | ttaaataatttttCATCTCTGAAGAC |
| | | | | | | | | | | | | | AAAAGGAAGCAATTGCTAATTTTAAG |
| | | | | | | | | | | | | | GAA[T/C]TGTATCGACTCAAGTTTG |
| | | | | | | | | | | | | | TTTARAAAATTTGAAAAAARCTTGTC |
| | | | | | | | | | | | | | AACTTGATATTTCTTAAGGAGATGCA |
| | | | | | | | | | | | | | TATTTAAGTAGCTRATTTACACAG |
| | | | | | | | | | | | | | GCAGATAACAACATAAACCTTACA |
| | | | | | | | | | | | | | TCAGTTCTTCAAGTACTTCAATCA |
| | | | | | | | | | | | | | ATGCCCATTTCTACTCAATTTTAAA |
| | | | | | | | | | | | | | TTAAATTCAACTGAAAAGATCTCT |
| | | | | | | | | | | | | | GTAAAGAGG |
| | | | | | | | | | | | | | (SEQ ID NO: 42) |
| | | | | H3 | | 2FAT | | C | Low risk | T | High | BIEC2- | tctggccccggctgggcgctggcctg |
| | | | | | | | | | | | risk | 1105596- | ggattcaccctctctggacaccagtt |
| | | | | | | | | | | | | H3 | tccacactaacgatatggagaggcca |
| | | | | | | | | | | | | | aagcagagaccctttgagaccccatc |
| | | | | | | | | | | | | | cagctgggatcctctaagatcccaAA |
| | | | | | | | | | | | | | GCAGTGACGGGAYTTGGAGCTCAACT |
| | | | | | | | | | | | | | GGTCACAGAGAAAGGAGACCTGT |
| | | | | | | | | | | | | | AATTTGGtgcctccatgcctt[c/t] |
| | | | | | | | | | | | | | gcacatctgatccctctacctggaat |
| | | | | | | | | | | | | | gtagctcttgtcatctttcacctggc |
| | | | | | | | | | | | | | caactcccactcattcattcacctaa |
| | | | | | | | | | | | | | cctgacaaatcctgagcacctactaa |
| | | | | | | | | | | | | | gtgctaggcaccaccagaMgcattga |
| | | | | | | | | | | | | | gaacacaacaatgaacaagacgagta |
| | | | | | | | | | | | | | tggcctccaagtagctcgcatgtagc |
| | | | | | | | | | | | | | ggaggagacagacatcac |
| | | | | | | | | | | | | | (SEQ ID NO: 43) |
| | | | | H4 | | LASP1 | | G | Low risk | A | High | BIEC2- | AATGGTGGAATAGTAAACGAAGT |
| | | | | | | | | | | | risk | 144169- | GATAGGAGAACCTCTCTTTTGGGA |
| | | | | | | | | | | | | H4 | AGAAGGCCAACTGGAAGTCTGGA |
| | | | | | | | | | | | | | AGCAAAAGGATGACTGGCCTAAG |
| | | | | | | | | | | | | | CTTGGCCCCCGCCCACCGGGGC |
| | | | | | | | | | | | | | CTATCCYGGAGCCCCAGCCCCAAC |
| | | | | | | | | | | | | | TCCTCCCGGTGCAACACCCCAAC |
| | | | | | | | | | | | | | ACATACAACCCACCAGAAAACTCG |
| | | | | | | | | | | | | | AACAGGGCAGTCCCC[A/G]CCCC |
| | | | | | | | | | | | | | CACAAACCCCCAAAACGACAGCC |
| | | | | | | | | | | | | | CCTCTCCCTCCCCCAATGCCTGG |
| | | | | | | | | | | | | | GAGGTGCTGGCAGAGTGCCCCAG |
| | | | | | | | | | | | | | TGCTGTCACCACCCAGTCTGCTG |
| | | | | | | | | | | | | | GCCTCTGCCTGCTTAGCTGCACA |
| | | | | | | | | | | | | | TGCCCCTGCCTGGGCCCCCGCCT |
| | | | | | | | | | | | | | CCCCTACCCCCGCAGGGGCCTGC |
| | | | | | | | | | | | | | CAGGAAAAACATTCTCTGGAATCC |
| | | | | | | | | | | | | | AGACCATGACC |
| | | | | | | | | | | | | | (SEQ ID NO: 44) |
| | | | | H5 | | HMGA | 26474182 | G | Low risk | A | High | HMGA2- | tcacccctgcctcgtcctccagccct |
| | | | | | | 2 | | | | | risk | H5 | atcgccccgtctcccgaaaggtgccg |
| | | | | | | | | | | | | | ggcggactcggggcggctgaggccag |
| | | | | | | | | | | | | | cggctgcagcggcggtagcggcggcg |
| | | | | | | | | | | | | | gcggcgggaggcaggatgagcgcacg |
| | | | | | | | | | | | | | cggtgagggcgccgggcagccgtcca |
| | | | | | | | | | | | | | cttcagcccagggacaacctgccgcc |
| | | | | | | | | | | | | | ccggcgcctcagaagagag[g/a]ac |
| | | | | | | | | | | | | | gcggccgacccaggaagcagcagcaa |
| | | | | | | | | | | | | | gtcagtacgcgggcggggtgggggca |
| | | | | | | | | | | | | | ccagcccgcctccgcgccctccgaga |
| | | | | | | | | | | | | | aggccaggccacgcgcggccccgagc |
| | | | | | | | | | | | | | gcgggagccgggtcgccgcgcgccgc |
| | | | | | | | | | | | | | ccgccggccggaggcgggggccgcgg |
| | | | | | | | | | | | | | cgtctccggcgcgagtgcgcggcgga |
| | | | | | | | | | | | | | gccccgggcgccc |
| | | | | | | | | | | | | | (SEQ ID NO: 55) |
| 1 | Recurrent | Disease | | RUN | Multi- | ECA3 | 24707981 | T | Non-risk | C | Risk | BIEC 2- | NC_009146.3:104403770- |
| | laryngeal | risk | | | ple | | | | | | | 808643 | 105830625 |
| | neuropathy | | | | | | | | | | | BIEC2_4 | (SEQ ID NO: 32 - See |
| | | | | | | | | | | | | 17210 | Sequence Listing.) |
| | | | | | | | | | | | | BIEC2_6 | |
| | | | | | | | | | | | | 24338 | |
| | | | | | | | | | | | | BIEC2_1 | |
| | | | | | | | | | | | | 125869 | |
| 1 | Osteo- | Bone | LOW | OCD | Dutch | Multi- | 23278111 | C | OCD Risk | T | OCD | BIEC2- | AGTGCTAAAGAAAAGCCAAATAAC |
| | chondresis | Disorder | | | Warm- | ple | | | | | Protect | 808543- | TCATGATTGGAGTCAGTTGGGTTT |
| | | | | | blood | | | | | | | OCD_D | AATGCAAGTCAGTTTTGCAGAGG |
| | | | | | | | | | | | | WB1 | CAGTTTTAAAGGAGAGACATGAAT |
| | | | | | | | | | | | | | CGGCAGAAATGCCTGCCCTTCCA |
| | | | | | | | | | | | | | GTGACAATAAGTGAAAAGAGAAG |
| | | | | | | | | | | | | | CCATCTATTTGCATGTTCTTGAGA |
| | | | | | | | | | | | | | GAAACCAAATTTGCCTGGCTAGA |
| | | | | | | | | | | | | | GAAGCATTCCAG[C/T]TTATTTCTG |
| | | | | | | | | | | | | | TACCCCAAAGGCAGAATCACAGG |
| | | | | | | | | | | | | | GAACACAATAGTGCAAACTTAAAT |
| | | | | | | | | | | | | | GAGAACCTCTACAAAGAATATTCC |
| | | | | | | | | | | | | | TCTCTCAACTCTCCTCTCTCTATG |
| | | | | | | | | | | | | | CTATCCGGTCAAAGCCAGAGGTG |
| | | | | | | | | | | | | | GAGAGTACCTATATGTTAATGCGT |
| | | | | | | | | | | | | | TGAATATATTAATAACAAACATTTG |
| | | | | | | | | | | | | | TTTTGAACTCCATTTTAAATTAGC |
| | | | | | | | | | | | | | (SEQ ID NO: 45) |
| | | | | | | | | G | | A | | BIEC2- | gactgagtgaccgtctgcacattcaa |
| | | | | | | | | | | | | 121320- | caggagaaactaagcccccttctcca |
| | | | | | | | | | | | | OCD_D | ccctcttaagagtgccagcagccagg |
| | | | | | | | | | | | | WB2 | catatgccagccatgcaggacgaagg |
| | | | | | | | | | | | | | gctcatcttttccagtaaccaaaaag |
| | | | | | | | | | | | | | ccctagaggaaaaaattctagatact |
| | | | | | | | | | | | | | aacatttgatgacacccagtcaccct |
| | | | | | | | | | | | | | gtacactgaagcccccat[c/a]aag |
| | | | | | | | | | | | | | cccaatccatccacacagcttctatc |
| | | | | | | | | | | | | | agcttttcagcgcctGGGAAACACAC |
| | | | | | | | | | | | | | ATGGTCAATTTCCCTAACATAGAAAG |
| | | | | | | | | | | | | | TCTACAAAGGGATTAAACAAAAGCAA |
| | | | | | | | | | | | | | TTTTGTAGTTAAACATTAAGGAAAA |
| | | | | | | | | | | | | | GAACTGGAATTTATAATATCAGGG |
| | | | | | | | | | | | | | AACATGCCATGCATGGACTTAATA |
| | | | | | | | | | | | | | ATTAATGCCTTTGCCCTGGT |
| | | | | | | | | | | | | | (SEQ ID NO: 46) |
| | | | | | | | | A | | C | | BIEC2- | AGAATAGAGTTTTATCATCCTCAA |
| | | | | | | | | | | | | 121823- | AAGCACAAAATTTAAATATGGTAA |
| | | | | | | | | | | | | OCD_D | TTTATCTAGTCACTCATTTTTAAAG |
| | | | | | | | | | | | | WB3 | TACCCCATATTTCCTCCAATCATTT |
| | | | | | | | | | | | | | ACCTACTAATCTAAAAAAACAGTG |
| | | | | | | | | | | | | | CCTCCCTTTTCATACTAATCTCTG |
| | | | | | | | | | | | | | GATCACCTTTCTGGTTCCCAGAAA |
| | | | | | | | | | | | | | CATCCCCTGGGAATCAATGCAATT |
| | | | | | | | | | | | | | TTAAAG[A/C]AAAGAAAGAAACGG |
| | | | | | | | | | | | | | GGAAAAAAAACACTTGCTTATATT |
| | | | | | | | | | | | | | TGTTTACTTTCATGCTATTCCACTA |
| | | | | | | | | | | | | | GTTTTTCTTTTTCTTTCTTTTCTTTT |
| | | | | | | | | | | | | | Atttatttatttttttgggaagatta |
| | | | | | | | | | | | | | gccctgaactagcatctgccgccaat |
| | | | | | | | | | | | | | cYtcctctttttgctgaggcagactg |
| | | | | | | | | | | | | | gccctaagctaacatccRtgcccatc |
| | | | | | | | | | | | | | ttcctct |
| | | | | | | | | | | | | | (SEQ ID NO: 47) |
| | | | | | | | | A | | G | | BIEC2- | CCTCATTAGCACACCTCTACAGCC |
| | | | | | | | | | | | | 121337- | AAGCCATCTACTGGGCACAAACC |
| | | | | | | | | | | | | OCD_D | TATTTTCCTCCTTTTCTTAACTAAG |
| | | | | | | | | | | | | WB4 | ATGGATCTGCTGCACTGATAGCCT |
| | | | | | | | | | | | | | ACAAAATTTCAATTTCATCCTGTAT |
| | | | | | | | | | | | | | CAAATACTTTAGGCGTATAAGAGT |
| | | | | | | | | | | | | | ATGAATGGCACGTTTTAAAAACAG |
| | | | | | | | | | | | | | AAATTAAGTAAAAATCGAGTTATA |
| | | | | | | | | | | | | | GTACTAT[A/G]AAAGACAAGTTCC |
| | | | | | | | | | | | | | AACCACACTTGGTTATCCAAAAGC |
| | | | | | | | | | | | | | CAACAGATTCAAAATATGACAGCT |
| | | | | | | | | | | | | | CTCTTGCCTTTTACTTCATGGAAG |
| | | | | | | | | | | | | | GAGTGAGGGAGTAATTTCATAAGT |
| | | | | | | | | | | | | | GATGAGGCCATGTGACAAATAAAT |
| | | | | | | | | | | | | | TCAGTGAGAGAACACACCAGAAA |
| | | | | | | | | | | | | | TGGATTTTGGAGAGAATCCAAGAA |
| | | | | | | | | | | | | | ATGTTGGTATGGAAAACATG |
| | | | | | | | | | | | | | (SEQ ID NO: 48) |
| 1 | | | | | Tho- | | 22952004 | C | | T | | BIEC2- | CTGAAATCTGTCCCCTAAATAAAG |
| | | | | | rough- | | | | | | | 793865- | GTATGTGTGCTTCACAACTATTTA |
| | | | | | bred | | | | | | | TB-OCD | TATTTACAAATAGTGTCGCTCAGG |
| | | | | | | | | | | | | | TCTTAAATCGAATGAATCTACTAA |
| | | | | | | | | | | | | | AGCATTAGCAGATGCTTATTTATG |
| | | | | | | | | | | | | | ACATATATGTGTTGTGAACACAAA |
| | | | | | | | | | | | | | TGACAGCCAATTTGGCACCTTACA |
| | | | | | | | | | | | | | GCTCACACAGAAGAGTTTCTGTAT |
| | | | | | | | | | | | | | GAAAGGTA[T/C]GATTAATTTGCTA |
| | | | | | | | | | | | | | TGGGAATACAATTACCACTCAACA |
| | | | | | | | | | | | | | TTTCCCTATTTGCAAAAAAAGTAG |
| | | | | | | | | | | | | | GTTGGGTAAAAGAAAGGCCATCC |
| | | | | | | | | | | | | | ATATTCTTACCTAGAAGATTTTTTT |
| | | | | | | | | | | | | | ACCATTACTAAGCAAATATTTTTGT |
| | | | | | | | | | | | | | GGCATCCCTACTATCAACGCTTGA |
| | | | | | | | | | | | | | TGACTGACATTAAGGACATTGTAG |
| | | | | | | | | | | | | | GAATGGAGATAGGTGCGT |
| | | | | | | | | | | | | | (SEQ ID NO: 49) |
| 4 | | | | | Fierch | | 21841084 | A | | G | | BIEC2- | CTAATCTAGGATAACCAGATTTTT |
| | | | | | Trotter | | | | | | | 808442- | GGATGTCCTTAAACTCTTCTCAAT |
| | | | | | | | | | | | | OCD_FT_{—} | ATTAAAATTTGATGAAAACATTCCA |
| | | | | | | | | | | | | Hock | TTTATCTAGCAGGCACAGATTAAC |
| | | | | | | | | | | | | | AGAAATGTAAGTCTCTTAGGATTT |
| | | | | | | | | | | | | | TCACTTGAATTCCCCTAAgttctttc |
| | | | | | | | | | | | | | ttYtgaaatattttttccagcctctt |
| | | | | | | | | | | | | | tttcctagttaattactattgacccc |
| | | | | | | | | | | | | | tca[a/g]tgtagcttaaaactcaga |
| | | | | | | | | | | | | | tctttatgaagcctttcctgataccc |
| | | | | | | | | | | | | | catgctagatcaacccctcACATGAT |
| | | | | | | | | | | | | | ATACACTGTTTCTCTTTCATGTCACT |
| | | | | | | | | | | | | | TATCACAGCTGACAAGCAACTtagag |
| | | | | | | | | | | | | | tagttgttagtatctcagactctaaa |
| | | | | | | | | | | | | | gccagactacccaggattaaatctta |
| | | | | | | | | | | | | | gctctcaatttattagctctgcagtc |
| | | | | | | | | | | | | | (SEQ ID NO: 50) |
| 1 | Impaired | Repro- | HIGH | IAR | Tho- | FKBP6 | 23284302 | G | Normal | A | Reduced | FKBP6- | AACAGGGGCAGTAACGACACCGA |
| | acrosome | ductive | | | rough | | | | | | fertil- | IAR1 | CCTGCTGTCATGGAGATGACCTC |
| | reaction | Disorder | | | bred | | | | | | ity | | TGCAGAGGCACCTGGCGCACACA |
| | (in^sub- | | | | | | | | | | | | CGGCAGTAGACAGAAGCCCACAA |
| | ferility) | | | | | | | | | | | | TCTGCAGGAGGACTAGAGCTGTG |
| | | | | | | | | | | | | | GTCACGCTTGCATCGTGGTGTTG |
| | | | | | | | | | | | | | TGGCTTTGTTTCCTCACTGGTGTC |
| | | | | | | | | | | | | | CTTGTCTTTGGTCCTCAGGAGCAA |
| | | | | | | | | | | | | | CAAGATCAATTTCC[G/A]CTTCAG |
| | | | | | | | | | | | | | AAGGTCCTGAAAGTGGCAGCTAC |
| | | | | | | | | | | | | | TGAACGGGAGTTTGGCAACTACC |
| | | | | | | | | | | | | | TTTTCCGCCAANATCGTTTCTATG |
| | | | | | | | | | | | | | ACGCCAAAGTGAGGTATAAACGG |
| | | | | | | | | | | | | | GTAAGACTTTCAAAGGATAGGTTT |
| | | | | | | | | | | | | | AGACCCTGAAACTTCCTTGTTTGA |
| | | | | | | | | | | | | | AAGATAGACTTTGTCTCTTTCCCT |
| | | | | | | | | | | | | | GGTCTTCCCTGGTCATATGCAGG |
| | | | | | | | | | | | | | CATTGA |
| | | | | | | | | | | | | | (SEQ ID NO: 21) |
| | | | | | | | | C | Normal | A | | FKBPS- | ACACACGGCAGTAGACAGAAGCC |
| | | | | | | | | | | | | IAE2 | CACAATCTGCAGGAGGACTAGAG |
| | | | | | | | | | | | | | CTGTGGTCACGCTTGCATCGTGG |
| | | | | | | | | | | | | | TGTTGTGGCTTTGTTTCCTCACTG |
| | | | | | | | | | | | | | GTGTCCTTGTCTTTGGTCCTCAGG |
| | | | | | | | | | | | | | AGCAACAAGATCAATTTCCNCTTC |
| | | | | | | | | | | | | | AGAAGGTCCTGAAAGTGGCAGCT |
| | | | | | | | | | | | | | ACTGAACGGGAGTTTGGCAACTA |
| | | | | | | | | | | | | | CCTTTTCCGCCAA[C/A]ATCGTTTC |
| | | | | | | | | | | | | | TATGACGCCAAAGTGAGGTATAAA |
| | | | | | | | | | | | | | CGGGTAAGACTTTCAAAGGATAG |
| | | | | | | | | | | | | | GTTTAGACCCTGAAACTTCCTTGT |
| | | | | | | | | | | | | | TTGAAAGATAGACTTTGTCTCTTT |
| | | | | | | | | | | | | | CCCTGGTCTTCCCTGGTCATATGC |
| | | | | | | | | | | | | | AGCCATTGAGAAAAATCTCATTAA |
| | | | | | | | | | | | | | AAAatccttgtgccagagagctaatg |
| | | | | | | | | | | | | | actaagagaggggacccaggatt |
| | | | | | | | | | | | | | (SEQ ID NO: 22) |
| | Fracture | Disease | HIGH | N/A | Tho- | | N/A | C | Risk | A | Normal | BIEC2- | atgagaattcaatgggaagaagaatc |
| | Risk - | Risk | | | rough- | | | | | | | 6883- | aggagtggaaatctagtacatttcag |
| | Thorough- | | | | bred | | | | | | | Frac1 | ttacacagcattcccgataaatattc |
| | bred | | | | | | | | | | | | gttgcatgaatgaatcgacctctgga |
| | | | | | | | | | | | | | aatattgggatagaaatgcttgactt |
| | | | | | | | | | | | | | ccaagagcctgcagtattagaggtgt |
| | | | | | | | | | | | | | gtcaagtcattttatttagacattaa |
| | | | | | | | | | | | | | taaaaagaatgctctcag[a/c]agc |
| | | | | | | | | | | | | | ttgtaggagttggggacatccaggCT |
| | | | | | | | | | | | | | CAAATTGTTGAGACCTAGATATTGGA |
| | | | | | | | | | | | | | AAATGATCCATTTGAAGAGGATGCTT |
| | | | | | | | | | | | | | TAAGGTTGAGGATGAGAAGTTGAGGC |
| | | | | | | | | | | | | | TGCTGATTCTAGAGAACTGTGTTT |
| | | | | | | | | | | | | | TGTATTTCTGCATCTTGCTTGTGT |
| | | | | | | | | | | | | | TTCTGGGAGGGAGATATGGGAAA |
| | | | | | | | | | | | | | ATGTTCTTAGATGTTTCTTTAA |
| | | | | | | | | | | | | | (SEQ ID NO: 51) |
| | | | | | | | | C | Risk | T | Normal | BIEC2- | AGTGGGGCTGTCAGAGGAACACC |
| | | | | | | | | | | | | 416680- | AATCAAGCTCATATTAATGGCAGC |
| | | | | | | | | | | | | Frac2 | AAGAGTCAGACCAATGTAACAGTC |
| | | | | | | | | | | | | | ATTCTCTGGAAGTATGTTTGGGCA |
| | | | | | | | | | | | | | CTGGCTGATGGCTCATCCGTAAAT |
| | | | | | | | | | | | | | CCTAGAGCTGAAATCCCAGTCCTA |
| | | | | | | | | | | | | | TCCAGGTGTAAATTATTGTACATC |
| | | | | | | | | | | | | | CTATATAATTGGGAAATTTAAATG |
| | | | | | | | | | | | | | ATCCTAACA[C/T]TATCTCTTACCT |
| | | | | | | | | | | | | | ATCATCCTTAGTCTGCTAGTTACA |
| | | | | | | | | | | | | | GGCATTTCTATAGCATTTGTTATT |
| | | | | | | | | | | | | | GTAAAGATGAATGAATTGGAATAT |
| | | | | | | | | | | | | | AGAATAAAACCTGCACATGGAAAG |
| | | | | | | | | | | | | | TAACAAGTAACCGCAACCAAGCAA |
| | | | | | | | | | | | | | CAAAAGGATTCACATTGGATGATA |
| | | | | | | | | | | | | | GGAAGGAAACTCATCCACAGCTT |
| | | | | | | | | | | | | | CAACTAGCATGGAACACCCCC |
| | | | | | | | | | | | | | (SEQ ID NO: 52) |
| | | | | | | | | A | Risk | G | Normal | BIEC2- | ACTGGTTTATGCATTTTGACTGGA |
| | | | | | | | | | | | | 416681- | ATGAGAATTTACTAATGGTAAAGA |
| | | | | | | | | | | | | Frac3 | TGTCTAAAAAACTGGCTATGAATA |
| | | | | | | | | | | | | | CAGAGTTTTAGAAGGACTATCAAA |
| | | | | | | | | | | | | | ATAAAACTCTCTCTACATGAAAAA |
| | | | | | | | | | | | | | ATAATACATTATAGTATTTCTATAC |
| | | | | | | | | | | | | | ACAAATCTAAATTGAATCCACCTC |
| | | | | | | | | | | | | | TAAACTGTGAGCTCAGAGCTTAGA |
| | | | | | | | | | | | | | GAGGGCA[A/G]GTGGATTTTTACT |
| | | | | | | | | | | | | | CTCATAAATTGTTACTTGGAAGCT |
| | | | | | | | | | | | | | TAGAAACTGCTTTATAGTCCTAAA |
| | | | | | | | | | | | | | TGCTTTCTCCCTTCCCTCCCAGGG |
| | | | | | | | | | | | | | ACCAGTGCTCATTGTACTGCATGC |
| | | | | | | | | | | | | | TATGACTGCCTGGAACTCCTGGA |
| | | | | | | | | | | | | | CATTGTCCCTTTGACAATGCTTCT |
| | | | | | | | | | | | | | CTCTCTCTTTACACTCATGCTCAA |
| | | | | | | | | | | | | | GAGGTTGCACGGAGCAGCCC |
| | | | | | | | | | | | | | (SEQ ID NO: 53) |
| | | | | | | | | C | Risk | T | Normal | BIEC2- | TTGCCATCAATTCTAACCTGAAAT |
| | | | | | | | | | | | | 416704- | ATGAATTGAGCATTTAAAGGATGA |
| | | | | | | | | | | | | Frac4 | TTGTATGTAAATAATATAAAAGGG |
| | | | | | | | | | | | | | GTAATAGTCATACATTGGCAATGT |
| | | | | | | | | | | | | | TGAGTTTCAAAGTTAGTTTTAAAG |
| | | | | | | | | | | | | | GAGATGCTTTATGTGTAATAGTGA |
| | | | | | | | | | | | | | AAAGTAAAGATAAAAAAATAAAATT |
| | | | | | | | | | | | | | GAGAAGAATATATCTATATCTGTA |
| | | | | | | | | | | | | | GCAATAC[C/T]TATGCCTATAACCA |
| | | | | | | | | | | | | | TATCAGAGTAGAAGCGGGACAAA |
| | | | | | | | | | | | | | ATGATTGATAAGAGCAAAGTAATT |
| | | | | | | | | | | | | | AGCAGTGAAGTTGTACAGAGGGG |
| | | | | | | | | | | | | | TATGCAGAAATGACACGTGGGCG |
| | | | | | | | | | | | | | ATGCAGAATGAATGTAATTTTGAA |
| | | | | | | | | | | | | | TGCtaaatataaaaattaataaaata |
| | | | | | | | | | | | | | ttaatttttCAATGATAACTTATCAC |
| | | | | | | | | | | | | | AACGTTATACATATATT |
| | | | | | | | | | | | | | (SEQ ID NO: 54) |

Nucleotides in bold brackets represent SNPs of the corresponding genetic locus.

[0097] The present disclosure is also useful for identifying potential health risks and harmful predispositions based on one or more genetic biomarkers obtained from a tissue sample of the animal. Mutations in several genes in horses are known risk or causative factors for development of various disease and non-disease conditions (e.g., the disease and non-disease conditions listed in Table 10, among others).

[0098] b. Genetic Markers of Behavioral Traits

[0099] The methods and systems disclosed herein encompass genetic profiling of non-human animals for use in producing an animal having an increased probability of exhibiting one or more desired physical and/or behavioral traits or predispositions. In the context of horses, but also applicable to other non-human animals, such traits and predispositions include, but are not limited to temperament, speed, and gait. Information about these traits can be added to the database for each reference animal and can be used as a selection criterion for the desired offspring animal.

[0100] i. Temperament

[0101] Animal temperament generally refers to stable individual patterns in behavior that are largely genetically determined and independent of learning. Non-limiting examples of behavioral traits pertaining to temperament in horses may include, for example, curiosity, dominance/submissiveness, passivity, aggression, anxiety, impulsiveness, plasticity, work ethic, sloth, sociability, neuroticism, playfulness, and territoriality, among others. Prior studies in horses have demonstrated a genetic link between genes and behavior, such as, e.g., polymorphisms in the dopamine receptor D4 (DRD4) gene and curiosity and vigilance traits (Momozawa et al. Mamm. Gen. 16:538-44, 2005; incorporated by reference herein). Variants of the same gene also show an association with behavioral displays of frustration in stabled horses. Temperament information (genetic or phenotypic) can be reported in the database for each reference (e.g., parental) animal and used as a selection criterion for the desired offspring animal. For example, genetic correlations between the DRD4 gene and temperament can be employed according to the methods described herein to produce an animal having a predetermined temperament (e.g., a curious, vigilant, curious/vigilant, spooky, non-spooky, hot, cold, or medium). Additional gene-behavior correlations may be employed using the methods and systems disclosed herein to produce an animal having a desired temperament.

[0102] According to the present disclosure, temperament may be assessed in a non-human animal using genetic testing by, e.g., determining the presence of one or more polymorphisms in the DRD4 gene in the animal, as is discussed above. Additionally, or alternatively, the temperament of the non-human animal may be self-reported by a person familiar with the animal, such as an owner, breeder, seller, or caretaker. Such subjective assessments may be made using conventional methods, such as, e.g., rating the animal's temperament on a scale from 1 to 10. A non-human animal assessed as having a self-reported temperament of 1 will generally be non-reactive, calm, and easy (i.e., “bombproof”). An animal assessed as having a self-reported temperament of 10 is generally high-energy, extremely spooky, and difficult to manage (i.e., “hot”). The present disclosure also allows for verification of self-reported assessments of animal temperament by means of genetic testing.

[0103] ii. Speed and Endurance

[0104] Additional behavioral traits that may be desirable in an animal, such as a horse, include traits related to athletic performance such as agility/endurance, coordination, jumping skills, gait, and ability to perform in a given discipline, among others. Polymorphisms in the myostatin (MSTN) gene have been shown to strongly associate with running speed and endurance in horses. Therefore, information pertaining to presence of particular variants of the MSTN gene in the animal may be used according to the methods described herein to produce an animal having desired agility and endurance characteristics. Horses may be produced that exhibit aptitudes for fast, short distance sprints (e.g., 7 furlongs or less [1 furlong=⅛^{th} of a mile or 220 yards]), middle-distance racing (e.g., 8-10 furlongs), or long-distance racing (e.g., >10 furlongs). It is important to note that aptitudes for sprints of a particular distance may depend on the age of the animal. Detailed characterizations of MSTN gene polymorphisms in horses as they pertain to speed and endurance aptitude in horses are described in, for example, Guilotto et al. BMC Genet. 16:126 (2015); Binns et al. Anim. Genet. 41(Suppl. 2): 154-8 (2010); Hill et al. PLoS One 5:e8645 (2010); Hill et al. Appl. Physiol. 112:86-90 (2012), and Bower et al., Nat. Comun. 3:643 (2012); the disclosures of which are incorporated herein in their entirety. Speed and endurance information can be reported in the database for each reference (e.g., parental) animal and used as a selection criterion for the desired offspring animal.

[0105] iii. Gait

[0106] Locomotion in certain breeds of horses (e.g., gaited breeds) is characterized by the ability to perform multiple unique gaits, typically corresponding to different speeds and footfall patterns. Some members of non-gaited (e.g., trotting) breeds are able to perform lateral movements. Furthermore, most horses transition into a three-beat canter at high speeds, however, certain individuals (e.g., harness racing breeds) can preserve intermediate gaits without breaking into a canter even at high speeds. Locomotion traits can be reported in the database for each reference (e.g., parental) animal and used as a selection criterion for the desired offspring animal.

[0107] Genetic determinants of gaiting in horses include the DMRT3 gene, a transcription factor expressed within spinal cord locomotor circuits. Some polymorphic variants of this gene in Icelandic Horses are associated with varying degrees of synchronization of diagonal legs and higher ratings of the trot and gallop, while other variants are associated with increased speed and coordination at the tölt. Horses having one or more copies of DMRT3 are often unable to canter or change leads. This can be problematic for Western Reining horses and a competitive advantage for Western Pleasure horses. Thus, the methods described herein encompass the incorporation of information relating to the DMRT3 gene (e.g., presence of a specific DMRT3 genotype in the animal) into the database system for the purpose of producing an animal having desired a gait characteristic.

[0108] While a large number of genes have been linked to physical and behavioral traits in horses, many remain to be discovered. Newly discovered associations may be incorporated into database and used in the methods of the present disclosure as they become available to refine the selection process for a desired phenotype in a non-human animal, to expand the breadth of genetic diagnoses of disease and non-disease conditions, and to open avenues for artificially manipulating these genes for the purpose of improving the health, performance, husbandry, and discipline-specific traits of the animal. The present disclosure allows for the discovery of new correlations between genetic markers and physical or behavioral attributes by correlating genetic information obtained from the animal (e.g., by way of genetic testing) with information gathered from secondary sources, such as behavioral data and show scores obtained from owners, breeders, and judges of various sporting events/competitions. Furthermore, the present disclosure allows for the correction of self-reported information about the animal using the animal's genetic information gathered according to the methods described herein if the genetic information is contradictory to the self-reported information.

[0109] c. Genetic Diagnostic Testing

[0110] As is described above, systems and methods of the disclosure can be used to identify a non-human animal (e.g., horse, cattle, sheep, dog, cat, camel, pig, goat, alpaca, donkey, llama, red fox, mouse, rat, ferret, non-human primate, rabbit, gerbil, hamster, chinchilla, or guinea pig, among others) as having one or more predetermined traits based on the expression levels (e.g., mRNA expression level or protein expression level) of one or more biomarkers in a biological sample obtained from the animal. The biological sample can include, for example, cells, tissue (e.g., a tissue sample obtained by hair sample or biopsy, such as, e.g., fresh frozen or formalin-fixed paraffin embedded tissue), blood, serum, plasma, urine, sputum, nail/hoof clippings, hair follicles, cell-free fetal DNA, mitochondria, a gamete (e.g., oocyte or spermatozoon), or an embryo of the offspring animal implanted as part of an in vitro fertilization (IVF) procedure. Numerous methods of determining biomarker expression levels, or expression profiling, are known in the art, including, but not limited to, microarrays, polymerase chain reaction (PCR), reverse transcriptase PCR (RT-PCR), quantitative real-time PCR (qPCR), Northern blots, Western blots, Southern blots, NanoString nCounter technologies (e.g., those described in U.S. Patent Application Nos. US 2011/0201515, US 2011/0229888, and US 2013/0017971, each of which is incorporated by reference in its entirety), next generation sequencing (e.g., RNA-Seq techniques), and proteomic techniques (e.g., mass spectrometry or protein arrays).

[0111] Accordingly, the one or more biomarkers may be a nucleotide sequence (e.g., DNA or RNA) encoding a gene of interest. The nucleotide sequence may be embodied in a single- or double-stranded polynucleotide. The presence or absence of expression of a particular gene marker (e.g., gene markers of Table 10) can be assessed using any of the methods known in the art for determining the nucleotide composition of a polynucleotide sequence. For example, the nucleotide sequence of a gene of interest can be assessed using nucleic acid sequencing technologies including but not limited to Sanger sequencing methods, Next Generation Sequencing (NGS; e.g., pyrosequencing, sequencing by reversible terminator chemistry, sequencing by ligation, and real-time sequencing) such as those offered on commercially available platforms (e.g., Illumina (e.g., AmpliSeq), Qiagen, Pacific Biosciences, Thermo Fisher, Roche, and Oxford Nanopore Technologies). Clonal amplification of target sequences for NGS may be performed using real-time polymerase chain reaction (also known as RT-qPCR) on commercially available platforms from Applied Biosystems, Roche, Stratagene, Cepheid, Eppendorf, or Bio-Rad Laboratories. Additionally, emulsion PCR methods can be used for amplification of target sequences using commercially available platforms such as Droplet Digital PCR by Bio-Rad Laboratories. Genetic analysis may be performed with respect to any one of the genes disclosed in Table 10 of the present disclosure, other genes or genetic loci associated with one or more of the additional traits and phenotypes described herein, as well as any one or more of the genes disclosed in Guerin et al., Anim. Genet. 34(3): 161-8 (2003), the disclosure of which is herein incorporated by reference in its entirety. Genomic sequencing may also be performed over the entire genome of a cell obtained from a non-human animal in order to detect a biomarker of interest. Exemplary analyses of an entire genome include but are not limited to a genome wide association study (GWAS) analysis. Other genes not described in the present disclosure may also be assayed according to known methods and information about those genes can also be incorporated into the database system for interrogation by a user according to the methods described herein. The results of a genetic analysis of an animal can also be incorporated into the database of the present disclosure and interrogated according to the systems and methods described herein.

[0112] The genetic markers for use in conjunction with the disclosure described herein may be single nucleotide polymorphism (SNP), tag SNP, microsatellite, short tandem repeat (STR), simple sequence repeat (SSR), restriction fragment length polymorphism (RFLP), variable number tandem repeats (VNTRs), amplified fragment length polymorphism (AFLP), insertion-deletion polymorphism (INDEL), random amplified polymorphic DNA (RAPD), ligase chain reaction, or a simple sequence conformation polymorphisms (SSCP).

[0113] In instances in which the genetic marker is an SNP, the disclosure provides methods for using SNP information gathered from a biological sample of the animal for genetic analysis. SNPs are particularly useful for analyzing the genome of mammals. First, SNPs occur with greater frequency (approximately 10 to 100 times larger), and with greater uniformity than other polymorphic markers such as RFLPs and VNTRs. The greater frequency of SNPs means that they can be more readily identified than the other classes of polymorphisms. The greater uniformity of their distribution permits the identification of SNPs that are “closer” to a particular attribute of interest. For example, if a particular trait (e.g., speed) reflects a mutation at a particular location (e.g., a myostatin gene locus), then any polymorphism that is linked to the specific gene locus, can be used to predict the likelihood that an individual will show that trait. SNPs are also more stable than other classes of polymorphisms. Their spontaneous mutation rate is approximately 10⁻⁹, approximately 1,000 times less frequently than VNTRs, which exhibit significantly higher mutation rates. Furthermore, SNPs have the additional advantage that their allele frequency can be determined from a smaller sample size as compared to other polymorphisms such as RFLPs or VNTRs, thereby offering a higher degree of genetic resolution for determining individual identity, pedigree, and susceptibility of an animal to a particular genetic trait. As an additional benefit, SNPs cover the whole genome, which may facilitate identification of potential interactions of gene products expressed from anywhere on the genome, without requiring prior knowledge about a potential interaction between genes.

[0114] Accordingly, SNPs (e.g., any one of the SNPs described in Table 1, among others) can be used in conjunction with the methods and systems of the present disclosure for genetic diagnostic testing and ancestry and parentage determination of a non-human animal (e.g., a horse). For example, the method of the present disclosure can be used to determine the probability that an animal, such as a horse, has a particular disease or non-disease condition (see, e.g., Table 1), is a member of a particular breed, or is an offspring of a specific animal or breeding pair. Detection of disease or non-disease conditions can be performed in the animal by detecting the presence of one or more disease- or non-disease condition-associated SNPs. Ancestry determination using SNP analysis can be carried out by analyzing genetic markers (e.g., SNPs) across the entire genome of the animal to identify the predominant overlapping markers present in the animal of interest and its ancestors. For the uses described above, lineage determination for a particular animal may be aided using the disclosure in conjunction with art-recognized methods.

[0115] d. Ancestry Determination

[0116] Certain groups of horses have been closely bred and tracked for centuries (e.g., “closed stud book”), thereby rendering their gene pool limited and easily tracked. Other breeds have rapidly or more recently developed for a variety of reasons. Many newer breeds were selectively bred to produce a specific appearance, size, conformation, or ability for different disciplines and emerging equine trends. While some sports or purposes remain specific with a stable focus (e.g., racing or carriage), others are constantly evolving with breeding trends, competition demands, and styles (e.g., hunter/jumper, color breeds, and reining). Therefore, a particular horse breed, such as, e.g., a Reining Quarter Horse, will have a dramatically different look today than it may have 40 years ago, whereas other breeds such as, e.g., Racing Harness horses, may appear largely similar with minor changes in step with each leading sire. In other examples, although most white markings may be nouveau, they are not new. While new genetic variants for white markings are constantly being discovered, some of the most popular variants have been around for a long time. For example, Tobiano horses, which are famous for making a Pinto spotting pattern on the coat) can be found in ancient horses from as far back as 3000-5000 years ago.

[0117] Thus, the methods and systems of the present disclosure may also be employed to perform a composition analysis that assesses non-human animal (e.g., equine) ancestry based on regional breeding practices and evolutionary drift. Horses from each region of the world (see FIGS. 3A-3C), group, or breed will have overlapping genotypes, which can be identified, compared, and graphically visualized in an Ancestry Report using the methods and systems disclosed herein (see FIG. 3D). Where horses have been closely bred (e.g., due to close proximity) or purposely bred to suit a specific discipline or need, the genetic content of these horses will cluster together and may correlate with breed designations. Dimensionality reduction methods such as, e.g., principal components analysis (PCA) can be applied to high-dimensional data sets containing genetic information about a plurality of horses to identify groups (or “clusters”) of genetically related horses. Ancestry analysis can be performed over large reference regions of the genome (e.g., using GWAS-based analysis, e.g., using SNPs as markers of genetic variance), although it can also be tailored to analyze specific genes or genetic loci. Registries, breeds, or closed groups of horses bred through longer periods of history may have more clearly defined gene clusters. In some cases, these clusters may be entirely separated from most horse samples (see FIG. 3D).

[0118] In some cases, a horse breeder may wish to determine the breed composition of a particular horse, or the potential breed composition of foal produced from the breeding of two or more horses. To this end, the user may order an Ancestry Report for an animal of interest using the database or system of the present disclosure (see FIG. 7 as an example of such a report generated using the computer-implemented user interface of the disclosure). Using genetic information obtained from a biological sample obtained from the animal of interest (e.g., by way of genetic diagnostic testing), the present disclosure provides a quantitative method for deconstructing the breed composition of the target animal based on an ADMIXTURE method described previously by Alexander et al. (Genome Res. 19:1655-64, 2009; incorporated herein by reference in its entirety). In general, the method first involves constructing a reference population of animals curated for specific individuals that fit the need and described breed or type (e.g., information, such as genetic information, of a reference population of animals of a specific type). Within the context of the present disclosure, purebred samples with known pedigrees across a large number of known breeds can be obtained and an optimal number of founder breeds (e.g., k=17) can be determined for ancestry analysis. Because each allele has a frequency that differs between breeds, comparing the breed probabilities with the actual alleles in a given horse across multiple loci allows for the estimation of breed composition (see FIG. 8D). Thus, the results of genetic diagnostic tests performed on an animal using the database system of the disclosure or the results of the genetic tests incorporated into the database system of the disclosure can be used to understand the breed composition of the animal. The same results can then be used as an exclusion or inclusion criteria to identify or produce a non-human animal having one or more desired traits using the database system of the disclosure. As an example, a horse breeder may wish to produce a racing horse that is at least, e.g., 30% Thoroughbred. The horse breeder may use the database system of the disclosure to specify “at least 30% Thoroughbred” as an inclusion criterion for selecting the desired horse phenotype.

[0119] In addition, methods for determining the ancestry or relatedness between two or more animals (e.g., two or more horses) can include using a “shared centimorgan (cM)” metric. cM is a metric commonly employed by geneticists to define the distance between chromosome positions and, therefore, can be used as a measure for assessing genetic linkage between two or more potentially related animals. While the breed-averaged recombination map spans 2.36 billion base pairs and accounts for 2,939.047 cM, one cM in a horse typically corresponds to 23.8 million base pairs (Beeson et al., Genome Res. 29:1744-52, 2019—incorporated by reference herein); however, this distance may vary between different animals, families, and especially breeds due to variations in rates of recombination across these dimensions. Within the context of the present disclosure, shared cM is useful as a metric that quantifies relatedness between two animals. As an example, an average horse has about 2,939 cM of DNA, half of which is inherited from each biological parent. Thus, any given horse inherits about 1,469.5 cM of DNA from each biological parent. In order to calculate the percentage of shared DNA between a first and a second individual, the total number of shared cM between the first and second individual can be divided by the total number of cM of the first individual. For example, a first animal having 217 shared cM with a second animal would have (217/2939=) 7.38% of shared DNA with the second animal. This measure accounts for genetic variation between two animals by comparing the differences between specific genetic regions in both animals and assessing the similarity between the regions. The similarity between the analyzed genetic loci may be useful for determining if two animals are siblings, half-siblings, cousins, or if they are more distantly related. Generally, measurement of shared cM requires performing genetic diagnostic testing on the two or more potentially related animals of interest, e.g., as is described herein, and quantifying the shared cM based on the results of the genetic tests.

[0120] In addition to shared cM, kinship analysis allows for increased accuracy in estimating relatedness between two or more animals (or two or more horses) from the same or different breeds (Manichaikul et al., Bioinformatics 26:2867-73, 2010—incorporated by reference herein). Kinship values are utilized in conjunction with shared cM to support or exclude relationships. While a negative kinship coefficient estimation indicates an unrelated relationship, close relatives can be inferred based on the estimated kinship coefficients averaged out through known related samples for each breed. As an example, an estimated kinship coefficient range >0.354, [0.177, 0.354], [0.0884, 0.177], and [0.0442, 0.0884] corresponds to duplicate/MZ twin, 1st-degree, 2nd-degree, and 3rd-degree relationships, respectively

[0121] The shared cM metric and kinship coefficients can be particularly useful to an animal breeder for producing a non-human animal having desirable characteristics using the computer-implemented database system described herein. For example, a horse breeder may desire to produce a racehorse that has a good temperament, multi-distance racing capability (e.g., CT genotype in the myostatin locus), and is slightly taller than average to achieve greater reach. In this example, the horse breeder already possesses a mare that is an Endurance-type (e.g., TT “distance” genotype in the myostatin allele) and is good for long distances but not fast enough in shorter sprints. The mare may have a relatively high F value of 15% but possesses an excellent temperament and is of medium size with good physical conformation. In order to produce a horse with characteristics desired by the breeder, the breeder may search for a sire that has: (1) “CC sprint” genotype in the myostatin allele to promote the “CT mid-distance” genotype; (2) increased height; and (3) good temperament. Upon finding one or more suitable candidate sires, the breeder may perform genetic testing or obtain prior genetic tests on the mare and sire using the database system of the disclosure to quantify how closely they are related using the shared cM and/or kinship analysis. Once the breeder has narrowed down the pool of potential sires, the shared cM and/or kinship coefficient measures can assist the breeder in determining whether the mare and the sire would share genes that are advantageous for producing a foal having the desired characteristics. For example, the breeder may use the database system of the disclosure to analyze shared cM and kinship coefficients between two horses of unknown relation on the basis of genetic diagnostic test results stored in the disclosed database system. Once the shared cM and kinship coefficient data is stored in the database system of the disclosure, the breeder may use the database system to include or exclude pairs of breeding horses on the basis of shared cM (e.g., exclude a sire and dam on the basis of a shared cM threshold) and/or kinship relatedness inferences.

[0122] Another quantitative metric useful for assessing ancestry of an animal using the computer-implemented database system described herein is the “inbreeding coefficient” (F). This metric measures the likelihood that two alleles of any given locus in an individual are identical based on descent from the common ancestors of the two parents. F is defined by the following formula:

$$F = \frac{observed homozygosity count - expected homozygosity count}{total allele count - expected homozygosity count}$$

where the expected homozygosity count is determined using the observed allele frequencies at each genetic locus. The F value—measured as the number of genetic variants that are homozygous—can be determined over specific genes but is typically measured over larger regions of the genome and assesses homozygosity across these regions relative to a reference population (e.g., reference population information stored in the database system of the disclosure). Without wishing to be bound by any theory, a high degree of inbreeding can negatively impact athletic performance (Samsonstuen et al., Acta Agri Scand 69(3):152-6, 2020; and Todd et al., Sci Rep 8:6167, 2018) and can increase susceptibility to deleterious health conditions, thereby negatively impacting the phenotypic value of an animal. Therefore, a horse breeder may desire to minimize F in a target foal to optimize its phenotype. The F metric can be employed independently or in combination with the shared cM metric to produce a phenotypically advantageous animal. Generally, a breeder may desire to produce or purchase an animal that has an F value that is, e.g., no greater than 0.2 (20%). Thus, the F value can be a suitable exclusion criterion for identification or production of animals having advantageous phenotypes. For example, once a horse breeder has analyzed the genetic relatedness between two horses using the shared cM metric, which compares specific genetic loci/genotypes between two animals, the breeder could further limit available candidate horses for buying, leasing, or breeding by specifying a limit on the inbreeding coefficient of a specific horse (e.g., F≤15%). The same analysis can be performed for a predicted foal that would be produced from a particular mare and stallion to produce a “likely inbreeding coefficient for foal.” Such a method would allow the breeder to select a breeding pair that would produce a foal with tangible individual genetic traits (e.g., myostatin genotype, color, disease predisposition) along with the not-so-tangible overall effect of inbreeding (see FIG. 6).

[0123] Another metric useful for assessing the ancestry of an animal is the heterozygosity score, which is taken as the percentage of observed genetic loci that have two different alleles. Heterozygosity is generally linked to the health of an animal since an animal with low zygosity has a lower survival and reproductive probability. The heterozygosity score can be useful in identifying the potential bloodline (e.g., breed or type) for an animal of unknown bloodline for pedigree tracing or health assessment (Petersen et al., PLoS One 8:e54997, 2013; and Excoffier et al., Evol. Bioinform. Online 1:47-50, 2005—both incorporated by reference herein). In the context of the computer-implemented database system of the disclosure, the heterozygosity score may be employed as a filter for identifying or producing a non-human animal (e.g., a horse) having a desired phenotype. For example, a horse breeder may wish to produce an animal having a heterozygosity score above a threshold value, such as, e.g., 0.232 (23.2%). Accordingly, the results of genetic diagnostic tests performed on an animal using the database system of the disclosure or the results of the genetic tests incorporated into the database system of the disclosure can be used to assess the heterozygosity score of the animal. The same results can then be used as an exclusion or inclusion criteria to identify or produce a non-human animal having one or more desired traits using the database system of the disclosure. As an example, a horse breeder may wish to produce a horse whose overall health assessment is based on a heterozygosity score of at least, e.g., 0.31 (31%). The horse breeder may use the database system of the disclosure to specify “at least 0.29 (29%) heterozygosity score” as an inclusion criterion for selecting the desired horse phenotype.

[0124] Yet another quantitative metric useful for assessing the ancestry of pairs of seemingly unrelated individuals is the “most like me” metric, which is based on a previously developed identity-by-descent (IBD) measure (Purcell et al., AJHG 81:559-75, 2007; incorporated herein by reference) that estimates ancestries from multi-locus or whole-genome association studies (WGAS). In short, a segment of DNA can be identical by descent in two or more individuals if they have inherited the segment from a common ancestor without recombination (i.e., the segment has the same ancestral origin in both individuals). IBD can be performed between an arbitrary number of possible pairs of animals (e.g., horses) and return the highest matches to identify two animals as ancestrally related. In the context of the database system of the disclosure, the “most like me” function interrogates the database using input criteria set by the user (e.g., one or more predetermined traits) by matching the input to equivalent or similar information present in the database system for a reference population of animals (e.g., animals previously registered into the database). As an example, a horse breeder may wish to identify or produce a horse having similar characteristics to a known horse with an advantageous phenotype set. The breeder could obtain a genetic sample from the known horse and perform genetic diagnostic testing on the animal (e.g., using methods disclosed herein). The breeder could then employ the computer-implemented database system of the disclosure to find another horse similar to the known horse using the “Horse like me” function of the computer-implemented user interface or by specifying the parameters of interest (e.g., Quarter horse, higher than average percentage of Thoroughbred breed, and from the “High Brow cat” bloodlines). The database system may interrogate one or more (e.g., 2, 3, 4, 5, 6, 7, 8, 9, 10, 20, 30, 40, 50, 60, 70, 80, 90, 100, 200, 300, 400, 500, 600, 700, 800, 900, 1000, 2000, 3000, 4000, 5000, 6000, 7000, 8000, 9000, 10000, or more) genetic loci causally linked to the one or more desired parameters/traits of interest in the known horse and determine whether the same loci might also be present in another existing horse and correlate with the same desired traits. This would allow the breeder to identify two horses (a sire and a dam) that are either available for sale/lease and breeding that, when bred, produce a horse that closely resembles the target phenotype. The breeder could further employ the shared cM metric to identify a full sibling of the same gender, color, and disposition as desired to buy, lease, or breed.

[0125] Because horses are continually being purpose-bred for ever-changing disciplines and desired traits, the ancestry analysis will be updated over time to account for genetic drift in the animal populations by continually incorporating information about horses into the database system of the disclosure. The results of an ancestry analysis may include discovery or beta-stage data that may change over time as equine science evolves. The currently defined population for equine ancestry may include unintended bias towards specific breeds or regions based on sample sizes and availability of horses for genetic testing. It is assumed to have an estimated error range of 5-7% which may change with growth, sampling, and discovery in the sample population. As populations, disciplines, and breeding trends change over time, so too will the results of each horse when compared within the population at the time.

[0126] e. Parentage Determination

[0127] The methods and systems disclosed herein may be used to identify parentage of an offspring animal whose parentage is fully or partially unknown (i.e., both parents are unknown, or a single parent is unknown). For example, results of genetic testing of a non-human animal (e.g., horse) can be analyzed (e.g., using the shared cM metric described herein) and compared to results of genetic testing of a plurality of horses catalogued in the database system of the disclosure. A variety of genetic markers (e.g., SNPs, such as, e.g., exclusion SNPs) can be used to test across a large number of carefully selected genes to test for parentage between horses. An exclusion SNP can be used to rule out the likelihood that an offspring animal and a candidate parent animal are related. Generally, the SNPs can be used to define an exclusion probability, which is the average capability of any genetic marker to exclude a group of unrelated individuals from a family. Typically, an individual is excluded as the parent of an offspring if the offspring's genotype at a particular genetic locus cannot be produced from the genotype of the candidate parent animal based on Mendelian inheritance and genetic mutations. A detailed description of methods for calculating parentage exclusion probabilities is described in Wang, Heredity 99:205-17 (2007), the disclosure of which is incorporated by reference in its entirety herein as it relates to determination of parentage exclusion probabilities. The database system may employ a comparison engine that assesses the degree of overlap between the genotype of a subject offspring horse whose parentage is fully or partially unknown and a plurality of candidate parent animals. The database system may then produce a probability matrix containing an array of exclusion probability values for one or more candidate parent animals. A low exclusion probability value (e.g., 12% or less, such as, e.g., 12%, 11%, 10%, 9%, 8%, 7%, 6%, 5%, 4%, 3%, 2%, 1%, or less) would indicate a high likelihood that the offspring animal and the candidate parent animal are related. Similarly, the database system may produce the absolute quantities for the number of exclusion SNPs identified in the one or more candidate parent animals (e.g., see FIG. 4A). A low number (e.g., less than 5, such as, e.g., 4, 3, 2, 1, or 0) of exclusion SNPs identified between the subject offspring animal and a candidate parent animal would also indicate a high probability that the two animals are related. Methods for parentage determination using SNPs are described in detail in Holl et al. Animal Genetics 48(6):669-76 (2017), the disclosure of which is herein incorporated by reference in its entirety.

[0128] B. Non-Genetic Information Gathered from Secondary Sources

[0129] While the genetic constitution of an animal may be determinative for a variety of different physical and behavioral traits, training and environmental factors also play a critical role. Relatedly, not all traits can presently be accounted for by genetic analysis alone. Therefore, the instant disclosure provides methods for gathering information about a non-human animal (e.g., a horse) from secondary (e.g., non-genetic) sources in order to complement genetic information about the animal. Combining genetic and non-genetic information about the animal according to the methods described herein provides an holistic animal profile that can be used to predict the phenotype of an animal with high confidence and/or to inform breeding cross-match evaluations for use in producing an animal having one or more predetermined traits.

[0130] The present disclosure allows for gathering of information from a variety of secondary sources including, but not limited to someone knowledgeable about the animal such as, e.g., the owner of the animal, an animal breeder/seller, or a caretaker; scores assigned to the animal during a competition pertaining to one or more predetermined traits; clinical/veterinary diagnostic testing performed in the animal pertaining to one or more predetermined traits; and a clinical assay of biological tissue obtained from the animal pertaining to one or more predetermined traits. Other secondary sources of information about an animal pertaining to one or more predetermined traits not described herein may be catalogued and added to the database in order to provide a more comprehensive non-genetic profile of the animal. The secondary source information can be added to the database for any reference (e.g., parental) animal and can be used, if desired, as a selection criterion for the desired offspring animal

[0131] a. Information Gathered from Someone Knowledgeable about the Animal

[0132] With respect to secondary source information gathered from someone knowledgeable about the animal, such information can be obtained from the owner/breeder/seller/caretaker of the animal in the form of a questionnaire. Such questionnaires can be designed to obtain detailed information about specific behaviors and skills of the animal of interest. Questionnaires are directed to a number of traits which include, but are not limited to spooking, jumping skill, speed, dressage, temperament, and gait, among others. Additionally, questionnaires relating to the health of the animal can also be gathered. Such questionnaires can include, for example, questions about the respiratory and digestive systems, lameness, bacterial, fungal, or viral susceptibility of the animal, among others.

[0133] b. Information Gathered from Sporting or Competition Events

[0134] With respect to secondary source information about the animal gathered during a sporting event or competition, such information can readily be made available as horses often showcase their skills at various events and judged on a gamut of physical and behavioral characteristics. Judges will evaluate horses based upon standardized scoring and marking system used in official dressage, jumping events, and other officially sanctioned events. The factors that are considered during judgement include, but are not limited to jumping ability, speed, quality of walk, trot, and canter, movement to music, temperament, ability to cut cows, ability to perform specialized gaits, ability to pull carts, racing (track and cross-country), ability to change leads during canter or gallop, and the ability to maneuver around a course or objects.

[0135] c. Information Gathered from Veterinary Assays

[0136] The present disclosure provides methods for gathering non-genetic information about a non-human animal from clinical/veterinary assay obtained from the animal pertaining to one or more predetermined traits. As technology and veterinary science have advanced, clinical laboratory testing has become useful in determining the parentage, health, and any ongoing infections in the animal. Just as in humans, blood analysis can be performed to assess the health of the animal such as, for example, measuring blood sugar levels, blood urea nitrogen, amylase, total calcium, and many other clinical lab values. Equipment manufacturers have also developed new equipment which can be configured to allow X-rays, CAT scans, PET scans, and several other advanced imaging techniques with horses and other large animals. Therefore, a variety of information may be measured, especially those related to traits of interest, including those related or thought to relate to performance characteristics, physical structure or disease predisposition. These measurements may include, but are not limited to, conformational and physiological parameters such as height, weight, limb length, limb angle, muscle volume, resting heart rate, time to resting heart rate after physical exertion, blood pressure, maximum oxygen uptake (VO₂ₘₐₓ), maximum carbon dioxide production (VCO₂ₘₐₓ), blood volume at rest and exercise, rebreathing measurements of lung volumes, maximum sprint speed, heart size, complete blood counter including white blood cell count, red blood cell count, hemoglobin levels, hematocrit, platelet count, and other blood cell morphology and biomarker evaluations and measurements, metabolic assays including blood sugar, protein, cholesterol, BUN, and interleukin-6 levels, DNA-based assessment of telomere length, fibrinogen levels, fecal ulcer PCR, transthyretin levels, and health parameters such as history of joint, skin, and diseases or conditions such as cardiovascular disease, orthopedic diseases, chronic obstructive pulmonary disease, pulmonary “bleeding” during extreme exertion, muscle diseases like exertional rhabdomyolysis, immune system disorders causing sarcoid tumors, and insect bite hypersensitivity. The condition may include normal, apparently normal, pre-clinical disease, overt disease, progress and/or stage of disease, undiagnosed or unclassified conditions, presence of drugs, response to exercise, response to vaccines, therapies, nutritional states, and response to environmental conditions. The disease may include inflammation or involvement of the immune system, and conditions affecting respiratory, musculoskeletal, urinary, gastrointestinal, adnexal, cardiovascular, reticuloendothelial, nervous, special senses, reproductive, and integument systems. Such conditions in the horse include laminitis, lameness, viral or bacterial disease, colic, gastritis, gastric ulcers, respiratory ailments, epistaxis, fractures, musculoskeletal damage or disorders, and joint disease, among others (e.g., any one of the conditions disclosed in Table 10). The listed set of physical and physiological parameters that may be tested according to the methods described herein are not exhaustive and additional parameters may also be subject to clinical/veterinary assessment.

[0137] The aforementioned non-genetic information gathered from secondary sources may be used independently or in combination with one or more pieces of genetic information about a known or a desired non-human animal in order to produce a holistic assessment of the animal. Such an assessment may be useful for purchasing or breeding decisions by informing the buyer or breeder regarding any known predispositions or bases for genetically-linked traits or conditions, or by informing the buyer or breeder about known history of health conditions, past diagnostic assessments, and past performance in specific competitions or disciplines. Such information may be correlated within the database system, e.g., when an observed non-genetic source of information about an animal's health or behavior is reflected in the genetic profile of the animal. Alternatively, the non-genetic information can be independent or complementary to the genetic information.

### Methods for Interrogating the Database System

[0138] The present disclosure provides methods for interrogating a computer-implemented database system to identify one or more breeding pairs capable of producing a non-human offspring animal having one or more predetermined traits, such as a database system storing a panel of at least 2 (e.g., 2, 5, 10, 20, 40, 80, 100, 200, 300, 500, 1000, or more) predetermined traits, such as, e.g., a panel of at least 2-40 (e.g., 2, 3, 4, 5, 6, 7, 8, 9, 10, 15, 20, 25, 35, or 40) predetermined traits. A user may interrogate the database system by selecting one or more (e.g., 1, 5, 10, 20, 40, 80, 100, 200, 300, 500, 1000, or more) predetermined traits desired in the offspring animal using the database system. In particular, the selection may be made from a panel of 2-40 (e.g., 2, 3, 4, 5, 6, 7, 8, 9, 10, 15, 20, 25, 35, or 40) traits. The user may further use the database system to identify the one or more breeding pairs capable of producing the offspring animal. For each identified breeding pair, the database system can be used to generate a probability matrix that includes an array of probability values pertaining to the likelihood that the offspring animal produced by each said breeding pair will have the one or more predetermined traits and displaying the probability matrix on a computer-implemented interface (e.g., such as an interface described herein). Generally, information about the breeding pair used to produce the probability matrix was previously integrated into the database system according to the methods described herein. Such information may include, e.g., information about the results of previously performed genetic diagnostic testing and/or non-genetic assessment of each of the breeder animals in the breeding pair (e.g., genetic markers for specific physical traits (e.g., size, coloration, patterns), behavioral traits such as temperament, speed, endurance, and gait, and metrics for ancestry and inbreeding, such as, e.g., shared cM, kinship coefficient, heterozygosity score, inbreeding coefficient (F), and identity-by-descent). The user may then select, based on the array of probability values, one or more of the breeding pairs likely to produce the offspring animal having the one or more predetermined traits. If the user is satisfied with the likelihood of producing the desired animal based on the results of the probability matrix, the user may continue with breeding the one or more breeding pairs to produce the offspring animal. The user may also use the database system to confirm the presence of one or more (e.g., 1, 5, 10, 20, 40, 80, 100, 200, 300, 500, 1000, or more) predetermined traits in the offspring animal, such as, e.g., 2-40 (e.g., 2, 3, 4, 5, 6, 7, 8, 9, 10, 15, 20, 25, 35, or 40) predetermined traits. Once the user has confirmed the presence of the one or more predetermined traits in the offspring animal, the user may then register the offspring animal the database system as a breeder animal.

### Use of the Database System to Produce Guidelines for Husbandry of a Non-Human Animal

[0139] The present disclosure further provides a method of producing a set of guidelines for breeding of a non-human animal (e.g., a non-human animal that is used in a breeding pair to produce an offspring animal). For example, a user may utilize the database system of the invention to identify the non-human animal and assess the presence of one or more predetermined traits in the non-human animal. Assessment of the presence of the one or more predetermine traits may include generating a probability matrix for the non-human animal using the database system and displaying the probability matrix on a graphical user interface. The probability matrix may include an array of probability values pertaining to the likelihood that the non-human animal has the one or more predetermined traits. The user may then determine, based on the assessment of the presence of the one or more predetermined traits in the non-human animal, one or more conditions under which the non-human animal will develop or is at risk of developing a disease or non-disease condition (e.g., any one of the conditions listed in Table 10, among others). If the database system has positively identified the non-human animal as being at risk of developing a disease or non-disease condition, the database system can generate the set of guidelines for breeding of the non-human animal to avoid manifestation of the disease or non-disease condition.

[0140] The set of guidelines may include one or more (e.g., 1, 2, 3, 4, 5, 6, 7, 8, 9, 10, or more) recommendations for mitigating or avoiding the one or more conditions that would result in manifestation of, or one or more symptoms of, the disease or non-disease condition and/or for reducing the likelihood of producing an effect in the offspring animal resulting from development of the disease or non-disease condition. In instances where the non-human animal is used for breeding to produce an offspring animal, the non-human animal may be a female parent animal or a male parent animal. In such instances, the set of guidelines produced by the database system may provide one or more recommendations that increases the likelihood of producing a non-human offspring animal having one or more predetermined traits. Generally, the one or more recommendations included in the set of guidelines may pertain to a diet, exercise regime, discipline, environmental exposure, medication, supplementary treatments, training, conditioning, use, and/or limitation of the non-human animal. For example, a user may select an non-human animal (e.g., a foal) to have a specific mutation to increase the likelihood of the foal having white markings with blue eyes. This particular mutation is likely to also result in deafness in the animal. To facilitate proper care and management of the animal, the method of the disclosure would provide guidelines (e.g., recommendations or instructions) for training or acclimating an animal that is hearing impaired or potentially requiring eye protection in bright environments. As another example, a user may apply the disclosed methods and systems to create a horse that is genetically predisposed to have exceptional jumping ability at maturity. The present disclosure would then provide guidelines to feed the animal a diet that is low in protein to avoid high rate of growth or to provide injections of joint supplements (e.g., Adequan) to ensure proper joint lubrication and preparation.

### Methods of Generating the Database System

[0141] A. Integration of Non-Human Animals into the Database System

[0142] The present disclosure further provides a method of generating a computer-implemented database system for producing a non-human offspring animal having one or more predetermined traits. The database system may be generated, e.g., by having a user provide information about the one or more predetermined traits from a plurality of non-human animals of a same type as the offspring animal. The information may include results of previously performed genetic testing and/or non-genetic assessment of the plurality of non-human animals, such as, e.g., results that identify and/or confirm the plurality of non-human animals as having the one or more of the predetermined traits. Such information may then be catalogued into the database system. The database system may be configured for interrogation by the user, e.g., in order to produce a probability matrix based on the catalogued information following the interrogation, such as, e.g., a probability matrix containing an array of probability values pertaining to the likelihood of the selected breeding pair producing a non-human offspring animal having the one or more predetermined traits or a probability matrix includes an array of probability values pertaining to the likelihood of the plurality of non-human animals having the one or more predetermined traits. Interrogation of the database system may include selecting one or more predetermined traits desired in the offspring animal and identifying from the plurality of non-human animals a breeding pair capable of producing said offspring animal. The user may further interrogate the database to select a breeding pair capable of producing the offspring having the one or more predetermined traits.

[0143] Information included in the non-genetic assessment described above may include, e.g., (i) information obtained from someone knowledgeable about the non-human animal pertaining to the one or more predetermined traits; (ii) results of one or more clinical assays performed on biological tissue obtained from the non-human animal pertaining to the one or more predetermined traits; (iii) results of one or more diagnostic tests performed on the non-human animal pertaining to the one or more predetermined traits; and/or (iv) scores assigned to the non-human animal during a competition pertaining to the one or more predetermined traits.

[0144] B. Trait Discovery

[0145] The methods and systems disclosed herein may be used to facilitate the discovery of previously undetected or undiagnosed traits in a non-human animal (e.g., a horse). In particular, the database system of the present disclosure may promote the discovery of previously unrecognized traits in the non-human animal by allowing an animal owner to provide or request results of genetic diagnostic testing on the animal and to provide non-genetic information about the animal (e.g., non-genetic information described herein) using the database system. Once the genetic and/or non-genetic information is integrated into the database system, it can be cross-referenced to genetic and/or non-genetic information of one or more animals previously catalogued in the database system to determine whether the animal has the previously unrecognized trait. For example, a horse of interest may have a particular gait pattern, the genetic basis of which was previously unknown. Accordingly, the user may submit or request genetic testing of the animal and provide photos and/or videos of the animal locomoting using the database system described herein. The database system subsequently cross-references the results of the genetic testing to the genetic profiles of horses previously catalogued in the database to identify, e.g., a novel variant of the DRMT3 gene responsible for the particular gait pattern of the subject horse. Furthermore, the gait of one or more horses previously catalogued in the database system can be assessed to determine whether the novel DMRT3 gene variant can robustly predict a particular gait behavior across multiple animals. Moreover, upon the discovery of a novel genetic variant in the subject horse, genetic modification can be performed in the horse to modify the animal's gait according with the phenotype desired by the horse owner. Relatedly, the severity of a particular gait trait in a horse may be graded with the number of particular genetic mutations or SNPs in the DMRT3 gene. Thus, the novel DMRT3 variant(s) discovered using the database system of the disclosure may be used to predict (e.g., by extrapolation) the severity of a particular gait trait when two or more mutations or SNPs are present. Subsequent to the prediction step, the newly discovered relationship between the number of mutations or SNPs at a genetic site or a particular gene, e.g., the DMRT3 gene, and a particular behavior, e.g., a gait behavior, can be used to produce a genetically modified horse having a desired behavior, e.g., a gait behavior, that could not have been generated without the previously unrecognized genetic variant, such as the DMRT3 variant of this example. A similar approach can be applied across a number of different traits, such as, e.g., any one of the traits disclosed herein. Finally, once the previously unrecognized trait is identified using the database system, it can be catalogued within the system for further trait discovery, production of non-human animals, and/or genetic modification.

[0146] The “Trait Discovery” feature of the disclosed database system further allows the user to perform any one of the following tasks: (1) verify a previous non-genetic assessment of a non-human animal by performing genetic testing on the animal using the database system; (2) identify a previously unidentified susceptibility to a disease or non-disease condition and use this information to modify husbandry practice with respect to the animal in order to accommodate the susceptibility; (3) identify a previously unrecognized association between two or more genes; and (4) identify a previously unrecognized association between two or more traits.

[0147] C. Database Architecture

[0148] The database systems of the present disclosure may be queried to identify animals having one or more predetermined traits by user-provided input criteria. As described herein, a computer-implemented user interface can be used to receive user input pertaining to one or more predetermined traits of the animal. The input dataset can be converted and expanded by a conversion/formatting engine of the system into a more versatile format and stored in a separate database subsystem (e.g., a user input subsystem). A comparison engine of the database system can be used to perform a comparison between information in the user input subsystem and the genetic profile and/or secondary source information subsystems to identify candidate non-human animals having one or more predetermined traits. The comparison engine can tabulate a list of all possible combinations of traits and then perform a comparison of those combinations with traits contained within the genetic profile subsystem and/or the secondary source information subsystem. The comparison engine can store those combinations that are found to occur and meet certain selection criteria in a separate database subsystem (e.g., a match subsystem) along with a numerical frequency of occurrence obtained as a count during the comparison. A statistical computation engine of the system can perform statistical computations based on the genetic and/or non-genetic information of the animal to obtain results (e.g., numerical probability values) for the likelihood of producing an animal having the one or more predetermined traits as well as, for example, the likelihood of the animal having a lethal genotype or of the animal having or developing a genetic disorder.

[0149] According to the present disclosure a database system can be used which contains a subsystem for accessing user input information pertaining to one or more predetermined traits, a second subsystem for accessing a set of database subsystems containing genetic and non-genetic information associated with a plurality of trait-positive and trait-negative animals, a data processing subsystem for identifying combinations of genetic and non-genetic traits associated with trait-positive animals, but not with trait-negative animals, and a calculating subsystem for determining a set of statistical results that indicates a strength of association between the combinations of genetic and non-genetic traits in trait-positive animals with the user input information. The system can also include a communications subsystem for retrieving at least some of genetic and non-genetic traits from at least one external database; a ranking subsystem for ranking the co-occurring traits according to the strength of the association of each co-occurring trait with the user input information; and a storage subsystem for storing the set of statistical results indicating the strength of association between the combinations of genetic and non-genetic traits and the user input information.

[0150] In a particular example, the computer-implemented database system may include a database subsystem(s) containing genetic information pertaining to one or more predetermined traits that can be used to identify an existing non-human animal having the one or more predetermined traits or one or more members of a breeding pair that could be bred to produce an offspring animal having the one or more predetermined traits. Such database subsystems may be instantiated as, e.g., a referential table containing information about genetic determinants of a particular phenotypic trait. The referential table may include, e.g., information pertaining to expression of a specific gene or a combination of genes or the allelic variants thereof that would identify a non-human animal as having the desired trait(s) or that would indicate that a non-human animal expressing said gene or combination of genes would be capable of producing an offspring animal having the desired trait. Said referential table may also include information pertaining to a mutation(s) or polymorphism(s) (e.g., SNP) in a non-coding region (e.g., intron, 5′ untranslated region (UTR), or 3′ UTR) or regulatory region (e.g., promoter, enhancer, or silencer) of a particular gene that may affect its expression.

[0151] For example, in the case of coat color, the database system may contain a referential table containing information pertaining to the genetic determinants of coat color in the non-human animal (e.g., a horse). A user wishing to identify a horse having a particular desired coat color could use the user interface of the present disclosure to use said coat color as a selection criterion. The user interface, being operably connected to the database system of the disclosure, may query the database system to identify the genes that are expressed in a horse to produce the desired coat color. Subsequently, the database system can search across the animals already catalogued in the database system to identify one or more non-human animals expressing the gene or combination of genes that produce said coat color in horses. Table 2 below provides an exemplary referential table for coat color selection that may be used in conjunction with the database system of the disclosure.

[0152] In another example, the database system of the disclosure can similarly be used to produce an animal having a particular coat color with specific coat color modifications (i.e., markings, such as, e.g., any one of the coat color markings described herein.). Similarly, the database system may contain a referential table containing information pertaining to the genetic determinants of coat color modifications in the horse. A user wishing to identify a horse having a particular desired coat color with a desired modification(s) could use the user interface of the present disclosure to use said coat color modification as a selection criterion. The user interface can query the database system to identify the genes that are expressed in a horse to produce the desired coat color and modifications. Subsequently, the database system can search across the animals already catalogued in the database system to identify one or more non-human animals expressing the gene or combination of genes that produce said coat color and modifications in horses. Table 3 and Table 4 below provide exemplary referential tables for coat color modification selection that may be used in conjunction with the database system of the disclosure. The genetic determinants for coat color modifications can be combined with the genetic determinants of the various coat color provided in Table 2 to identify horses having complex coat colors and marking pattern genotypes (see Table 5).

[0153] In producing a horse having a desired coat color and/or coat color modification, a user may need to take caution to avoid producing a horse with a potentially deleterious or fatal genotype. Accordingly, the database system of the disclosure can be used to produce an animal having a particular coat color with or without a specific coat color modifications that avoids a deleterious or a fatal genotype. To this end, the database system of the disclosure may contain a referential table containing information pertaining to the genetic determinants of coat color and/or coat color modifications in the horse that produce a deleterious of fatal phenotype. A user wishing to identify a horse lacking the potentially deleterious or fatal genotype could use the user interface of the present disclosure to identify animals lacking this genotype. The user interface can query the database system to identify the genes that are expressed in a horse to produce the deleterious or fatal phenotype. Subsequently, the database system can search across the animals already catalogued in the database system to identify one or more non-human animals lacking the gene or combination of genes that produce the potentially deleterious or fatal phenotype. Table 6 below provides an exemplary referential table for potentially deleterious or fatal coat color/modification genotypes to be used in conjunction with the database system of the disclosure.

[0154] In another example, the database system of the disclosure can be used to produce an animal that does not express one or more disease or non-disease conditions (e.g., any one of the disease or non-disease conditions described in Table 10). To this end, the database system may contain a referential table containing information pertaining to the genetic determinants of a plurality of disease or non-disease conditions. A user wishing to identify a horse does not exhibit a particular disease or non-disease condition can use the user interface of the present disclosure to select one or more disease or non-disease conditions that are desirably avoided in the animal. The user interface can query the database system to identify the genes that are expressed in a horse to produce the disease or non-disease condition. Subsequently, the database system can search across the animals already catalogued in the database system to identify one or more non-human animals that do not express the gene(s) that produce the disease or non-disease condition in horses. Table 7 and Table 8 below provide an exemplary referential table for disease and non-disease conditions that may be used in conjunction with the database system of the disclosure.

[0155] In yet another example, the database system of the disclosure can be used to produce an animal that exhibits a particular behavioral (e.g., curiosity/vigilance) or ability (e.g., gaited/non-gaited/carrier) trait. To this end, the database system may contain a referential table containing information pertaining to the genetic determinants of a plurality behavioral/ability traits. A user wishing to identify a horse exhibiting one or more behavioral/ability traits can use the user interface of the present disclosure to select one or more behavioral/ability traits desired in the horse. The user interface can query the database system to identify the genes that are expressed in a horse to produce the one or more behavioral/ability traits. Subsequently, the database system can search across the animals already catalogued in the database system to identify one or more non-human animals that express the gene(s) that produce the behavioral/ability trait in horses. Table 9 below provides an exemplary referential table for behavioral/ability traits and their genetic determinants that may be used in conjunction with the database system of the disclosure.

TABLE 2
Referential table for coat color in horses

| ID | Coat color | Also known as | ASIPA | BIEC2816500E | TBX3nd1 | TBX3nd1alt | SLC36a1CH | PMEL17Z | SLC45A2CR | SLC45A2PRL |
|---|---|---|---|---|---|---|---|---|---|---|
| 100 | Amber Dun | Amber | X | X | X | X | X | n/n | n/n | n/n |
| | | Champagne | | | | | | | | |
| | | Dun | | | | | | | | |
| 106 | Amber Dun | Pseudocream | X | X | X | X | X | n/n | n/n | X/X |
| | Pearl | Amber | | | | | | | | |
| 2 | Bay | | X | X | n/n | n/n | n/n | n/n | n/n | n/n |
| 3 | Black | | n/n | X | n/n | n/n | n/n | n/n | n/n | n/n |
| 5 | Buckskin | Bay Cream | X | X | n/n | n/n | n/n | n/n | X/n | n/n |
| 9 | Gold | | n/n | n/n | n/n | n/n | X | n/n | n/n | n/n |
| | Champagne | | | | | | | | | |
| 8 | Classic | | n/n | X | n/n | n/n | X | n/n | n/n | n/n |
| | Champagne | | | | | | | | | |
| 7 | Amber | | X | X | n/n | n/n | X | n/n | n/n | n/n |
| | Champagne | | | | | | | | | |
| 101 | Champagne | Classic | n/n | X | X | X | X | n/n | n/n | n/n |
| | Dun | Champagne | | | | | | | | |
| | | Dun | | | | | | | | |
| 107 | Champagne | Pseudocream | n/n | X | X | X | X | n/n | n/n | X/X |
| | Dun Pearl | Classic | | | | | | | | |
| 93 | Champagne | | n/n | n/n | n/n | n/n | X | n/n | n/n | X/X |
| | Gold Pearl | | | | | | | | | |
| 91 | Champagne | | n/n | X | n/n | n/n | X | n/n | n/n | X/X |
| | Classic Pearl | | | | | | | | | |
| 89 | Champagne | | X | X | n/n | n/n | X | n/n | n/n | X/X |
| | Amber Pearl | | | | | | | | | |
| 92 | Gold Cream | | n/n | n/n | n/n | n/n | X | n/n | X | n/n |
| 90 | Classic | | n/n | X | n/n | n/n | X | n/n | X | n/n |
| | Cream | | | | | | | | | |
| 88 | Amber | | X | X | n/n | n/n | X | n/n | X | n/n |
| | Cream | | | | | | | | | |
| 99 | Cream Grullo | Dun Black | n/n | X | X | X | n/n | n/n | X/X | n/n |
| | | Double | | | | | | | | |
| | | Cream | | | | | | | | |
| 96 | Chestnut | | n/n | n/n | n/n | n/n | n/n | n/n | X/n | X/n |
| | Cream Pearl | | | | | | | | | |
| 95 | Black Cream | | n/n | X | n/n | n/n | n/n | n/n | X/n | X/n |
| | Pearl | | | | | | | | | |
| 94 | Bay Cream | | X | X | n/n | n/n | n/n | n/n | X/n | X/n |
| | Pearl | | | | | | | | | |
| 10 | Cremello | Dun Chestnut | n/n | n/n | n/n | n/n | n/n | n/n | X/X | n/n |
| | | Double | | | | | | | | |
| | | Cream | | | | | | | | |
| 18 | Red Dun | | n/n | n/n | X | X | n/n | n/n | n/n | n/n |
| 105 | Apricot Dun | | n/n | n/n | X | X | n/n | n/n | n/n | X/X |
| 102 | Gold Dun | | n/n | n/n | X | X | X | n/n | n/n | n/n |
| 17 | Classic Dun | | X | X | X | X | n/n | n/n | n/n | n/n |
| 104 | Dun Pearl | | n/n | X | X | X | n/n | n/n | n/n | X/X |
| | Black | | | | | | | | | |
| 103 | Dun Pearl | | X | X | X | X | n/n | n/n | n/n | X/X |
| | Bay | | | | | | | | | |
| 19 | Dunolino | Dun Chestnut | n/n | n/n | X | X | n/n | n/n | X/n | n/n |
| | | Cream | | | | | | | | |
| 20 | Dunskin | Dun Bay | X | X | X | X | n/n | n/n | X/n | n/n |
| | | Cream | | | | | | | | |
| 108 | Gold Dun | Pseudocream | n/n | n/n | X | X | X | n/n | n/n | X/X |
| | Pearl | Gold | | | | | | | | |
| 32 | Grullo | Black Dun | n/n | X | X | X | n/n | n/n | n/n | n/n |
| 57 | Palomino | Chestnut | | n/n | n/n | n/n | n/n | n/n | X/n | n/n |
| | | Cream | | | | | | | | |
| 58 | Apricot Pearl | | n/n | n/n | n/n | n/n | n/n | n/n | n/n | X/X |
| 62 | Black Pearl | | n/n | X | n/n | n/n | n/n | n/n | n/n | X/n |
| 60 | Bay Pearl | | X | X | n/n | n/n | n/n | n/n | n/n | X/n |
| 64 | Perlino | Bay Double | X | X | n/n | n/n | n/n | n/n | X/X | n/n |
| | | Cream | | | | | | | | |
| 97 | Perlino Dun | Dun Bay | X | X | X | X | n/n | n/n | X/X | n/n |
| | | Double | | | | | | | | |
| | | Cream | | | | | | | | |
| 67 | Red | Chestnut, | | n/n | n/n | n/n | n/n | n/n | n/n | n/n |
| | | Sorrel | | | | | | | | |
| 121 | Silver Amber | Silver Amber | X | X | X | X | X | X | n/n | n/n |
| | Dun | Champagne | | | | | | | | |
| | | Dun | | | | | | | | |
| 113 | Silver | | n/n | X | n/n | n/n | X | X | n/n | n/n |
| | Classic | | | | | | | | | |
| | Champagne | | | | | | | | | |
| 111 | Silver Amber | | X | X | n/n | n/n | X | X | n/n | n/n |
| | Champagne | | | | | | | | | |
| 122 | Silver | | n/n | X | X | X | X | X | n/n | n/n |
| | Champagne | | | | | | | | | |
| | Dun | | | | | | | | | |
| 114 | Silver | | n/n | X | n/n | n/n | X | X | n/n | X/X |
| | Classic | | | | | | | | | |
| | Champagne | | | | | | | | | |
| | Pearl | | | | | | | | | |
| 112 | Silver | | X | X | n/n | n/n | X | X | n/n | X/X |
| | Classic | | | | | | | | | |
| | Amber Pearl | | | | | | | | | |
| 116 | Silver Black | | n/n | X | n/n | n/n | n/n | X | X/n | X/n |
| | Cream Pearl | | | | | | | | | |
| 115 | Silver Bay | | X | X | n/n | n/n | n/n | X | X/n | X/n |
| | Cream Pearl | | | | | | | | | |
| 71 | Silver Dapple | Silver Black | n/n | X | n/n | n/n | n/n | X | n/n | n/n |
| 300 | Silver Red | | X or n | n/n | n/n | n/n | n/n | X | n/n | n/n |
| 70 | Silver Bay | | X | X | n/n | n/n | n/n | X | n/n | n/n |
| 72 | Silver | | X | X | n/n | n/n | n/n | X | X/n | n/n |
| | Buckskin | | | | | | | | | |
| 120 | Silver Cream | Silver Dun | n/n | X | X | X | n/n | X | X/X | n/n |
| | Grullo | Black Double | | | | | | | | |
| | | Cream | | | | | | | | |
| 73 | Silver Dun | Silver Dapple | X | X | X | X | n/n | X | n/n | n/n |
| | | Dun | | | | | | | | |
| 117 | Silver | Silver Dun | X | X | X | X | n/n | X | X/n | n/n |
| | Dunskin | Bay Cream | | | | | | | | |
| 119 | Silver Grullo | Silver Dun | n/n | X | X | X | n/n | X | n/n | n/n |
| | | Black | | | | | | | | |
| 126 | Silver Pearl | | n/n | X | n/n | n/n | n/n | X | n/n | X/X |
| | Black | | | | | | | | | |
| 125 | Silver Pearl | | X | X | n/n | n/n | n/n | X | n/n | X/X |
| | Bay | | | | | | | | | |
| 109 | Silver Perlino | Silver Bay | X | X | n/n | n/n | n/n | X | X/X | n/n |
| | | Double | | | | | | | | |
| | | Cream | | | | | | | | |
| 118 | Silver Perlino | Silver Dun | X | X | X | X | n/n | X | X/X | n/n |
| | Dun | Bay Double | | | | | | | | |
| | | Cream | | | | | | | | |
| 124 | Silver Dun | | n/n | X | X | X | n/n | X | n/n | X/X |
| | Pearl Black | | | | | | | | | |
| 123 | Silver Dun | | X | X | X | X | n/n | X | n/n | X/X |
| | Pearl Bay | | | | | | | | | |
| 110 | Silver Smoky | Silver Black | n/n | X | n/n | n/n | n/n | X | X/X | n/n |
| | Cream | Double | | | | | | | | |
| | | Cream | | | | | | | | |
| 74 | Smoky Black | Black Cream | n/n | X | n/n | n/n | n/n | n/n | X/n | n/n |
| 75 | Smoky | Black Double | n/n | X | n/n | n/n | n/n | n/n | X/X | n/n |
| | Cream | Cream | | | | | | | | |
| 98 | Smoky | Dun Black | n/n | X | X | X | n/n | n/n | X/n | n/n |
| | Grullo | Cream | | | | | | | | |
| 171 | Champagne | | | | | | X | | | X/X |
| | Pearl | | | | | | | | | |
| 172 | Cream Pearl | | | | | | | | X/n | X/n |
| 173 | Dun Pearl | | | | X | X | | | | X/X |
| 174 | Silver | | | | | | X | X | | |
| | Champagne | | | | | | | | | |
| 175 | Silver | | | | | | X | X | | X/X |
| | Champagne | | | | | | | | | |
| | Pearl | | | | | | | | | |
| 176 | Silver Cream | | | | | | | X | X/n | X/n |
| | Pearl | | | | | | | | | |
| 177 | Silver Pearl | | | X | | | | X | | X/X |
| 178 | Silver Dun | | | X | X | X | | X | | X/X |
| | Pearl | | | | | | | | | |
| 185 | Silver Bay | | X | X | | | | X | X | |
| | Cream | | | | | | | | | |
| | Chestnut/Red/ | | X or n | n/n | | | | | | |
| | Sorrel | | | | | | | | | |

TABLE 3
Referential table of coat color modifications in horses

| | Coat color | | | | | | | | |
|---|---|---|---|---|---|---|---|---|---|
| ID | modification | EDNRB_TC_to_AG | STX17A | TRPM1LP | RFWD3PATN1 | KIT1SB12 | TobianoE2 | KRT25_CurlyHipo | SP6_Curly |
| 14 | Dominant | | | | | | | | |
| | White | | | | | | | | |
| | W20/n | | | | | | | | |
| 15 | Dominant | | | | | | | | |
| | White | | | | | | | | |
| | W20/W20 | | | | | | | | |
| 16 | Dominant | | | | | | | | |
| | White | | | | | | | | |
| | W5/W20 | | | | | | | | |
| 31 | Grey | | X | | | | | | |
| 25 | Leopard | | | X/n | | | | | |
| | Spotting | | | | | | | | |
| | Complex | | | | | | | | |
| | (varnish) | | | | | | | | |
| | Leopard | | | X/X | n/n | | | | |
| | Spotting | | | | | | | | |
| | Complex | | | | | | | | |
| | (varnish) | | | | | | | | |
| | Leopard | | | X/n | X/n | | | | |
| | Spotting | | | | | | | | |
| | Complex | | | | | | | | |
| | (varnish | | | | | | | | |
| | leopard) | | | | | | | | |
| | Leopard | | | X/X | X/n | | | | |
| | Spotting | | | | | | | | |
| | Complex | | | | | | | | |
| | (fewspot) | | | | | | | | |
| | Leopard | | | X/n | X/X | | | | |
| | Spotting | | | | | | | | |
| | Complex | | | | | | | | |
| | (leopard) | | | | | | | | |
| | Leopard | | | X/X | X/X | | | | |
| | Spotting | | | | | | | | |
| | Complex | | | | | | | | |
| 42 | Pattern 1 | | | | X | | | | |
| 56 | Overo | X/n | | | | | | | |
| | (LWO/n) | | | | | | | | |
| 68 | Sabino1 | | | | | X | | | |
| 76 | Splashed | | | | | | | | |
| | White 1 | | | | | | | | |
| 77 | Splashed | | | | | | | | |
| | White 2 | | | | | | | | |
| 78 | Splashed | | | | | | | | |
| | White 3 | | | | | | | | |
| 79 | Splashed | | | | | | | | |
| | White 4 | | | | | | | | |
| 80 | Splashed | | | | | | | | |
| | White 5 | | | | | | | | |
| 84 | Tobiano | | | | | | X | | |
| 85 | Tovero | X/n | | | | | X | | |
| 184 | Curly Coat | | | | | | | X | X |

| | Coat color | | | | | | | | |
|---|---|---|---|---|---|---|---|---|---|
| ID | modification | MITFS-W1 | MITFS-W3 | MITFS-W5 | PAX3SW2 | PAX3P32R | KITW5 | KITW20 | Description |
| 14 | Dominant | | | | | | | X/n | One W20 variant; may result |
| | White | | | | | | | | in White markings. |
| | W20/n | | | | | | | | |
| 15 | Dominant | | | | | | | X/X | Two W20 variant; may result |
| | White | | | | | | | | in White markings. |
| | W20/W20 | | | | | | | | |
| 16 | Dominant | | | | | | X/n | X/n | One W20 variant and one |
| | White | | | | | | | | W5 variant; may result in |
| | W5/W20 | | | | | | | | White markings. |
| 31 | Grey | | | | | | | | Grey variant; may cause |
| | | | | | | | | | progressive greying of entire |
| | | | | | | | | | coat (possibly appearing |
| | | | | | | | | | white at maturity) - increased |
| | | | | | | | | | risk of melanoma |
| 25 | Leopard | | | | | | | | One LP variant; may result in |
| | Spotting | | | | | | | | White markings. |
| | Complex | | | | | | | | |
| | (varnish) | | | | | | | | |
| | Leopard | | | | | | | | |
| | Spotting | | | | | | | | |
| | Complex | | | | | | | | |
| | (varnish) | | | | | | | | |
| | Leopard | | | | | | | | |
| | Spotting | | | | | | | | |
| | Complex | | | | | | | | |
| | (varnish | | | | | | | | |
| | leopard) | | | | | | | | |
| | Leopard | | | | | | | | |
| | Spotting | | | | | | | | |
| | Complex | | | | | | | | |
| | (fewspot) | | | | | | | | |
| | Leopard | | | | | | | | |
| | Spotting | | | | | | | | |
| | Complex | | | | | | | | |
| | (leopard) | | | | | | | | |
| | Leopard | | | | | | | | |
| | Spotting | | | | | | | | |
| | Complex | | | | | | | | |
| 42 | Pattern 1 | | | | | | | | One or two PATN1 variant in |
| | | | | | | | | | combination; may result in a |
| | | | | | | | | | “leopard pattern with |
| | | | | | | | | | Leopard Spotting Complex |
| | | | | | | | | | (LP/n).” |
| 56 | Overo | | | | | | | | One LWO variant; may result |
| | (LWO/n) | | | | | | | | in White markings. |
| 68 | Sabino1 | | | | | | | | One SB1 variant; may result |
| | | | | | | | | | in White markings. |
| 76 | Splashed | X | | | | | | | One Splashed White One |
| | White 1 | | | | | | | | variant; may result in White |
| | | | | | | | | | markings on the face, legs |
| | | | | | | | | | and body with possible blue |
| | | | | | | | | | eye(s) |
| 77 | Splashed | | | | X/n | | | | One Splashed White Two |
| | White 2 | | | | | | | | variant; may result in White |
| | | | | | | | | | markings on face/head, legs |
| | | | | | | | | | and body with possible blue |
| | | | | | | | | | eye(s) and risk of deafness in |
| | | | | | | | | | one or both ears |
| 78 | Splashed | | X/n | | | | | | One Splashed White Three |
| | White 3 | | | | | | | | variant; may result in White |
| | | | | | | | | | markings |
| 79 | Splashed | | | | | X | | | One Splashed White Four |
| | White 4 | | | | | | | | variant, may result in White |
| | | | | | | | | | markings. |
| 80 | Splashed | | | X/n | | | | | One Splashed White Five |
| | White 5 | | | | | | | | variant; may result white/bald |
| | | | | | | | | | face marking, blue eye(s), |
| | | | | | | | | | white on legs and body with |
| | | | | | | | | | high risk for deafness in one |
| | | | | | | | | | or both ears |
| 84 | Tobiano | | | | | | | | One Tobiano variant; may |
| | | | | | | | | | result in large white markings |
| | | | | | | | | | on body, face and legs |
| | | | | | | | | | (occasionally produces |
| | | | | | | | | | “minimal” or “slipped” |
| | | | | | | | | | Tobiano horse with very little |
| | | | | | | | | | white only on face and lower |
| | | | | | | | | | legs (ongoing heritability |
| | | | | | | | | | study for minimal Tobiano) |
| 85 | Tovero | | | | | | | | Tobiano and Lethal White |
| | | | | | | | | | Overo variants may result in |
| | | | | | | | | | large white spots (to nearly |
| | | | | | | | | | white) with likely blue eye(s) |
| 184 | Curly Coat | | | | | | | | Curly variant; results in curly |
| | | | | | | | | | texture to coat, mane and tail |

TABLE 4
Referential table for coat color modifications in horses (continued)

| ID | Name | ASIPA | BIEC2816500E | TBX3nd1 | TBX3nd1alt | SLC36a1CH | PMEL17Z | SLC45A2CR | SLC45A2PRL |
|---|---|---|---|---|---|---|---|---|---|
| 394 | Agouti (A/A) | X/X | | | | | | | |
| 395 | Agouti (A/a) | X/n | | | | | | | |
| 396 | Black (E/E) | | X/X | | | | | | |
| 397 | Black (E/e) | | X/n | | | | | | |
| 398 | Red (e/e) | | n/n | | | | | | |
| 399 | Dun (D/D) | | | X/X | X/X | | | | |
| 400 | D/nd1**or D/nd2*** | | | X/n | X/n | | | | |
| 401 | Champagne (CH/CH) | | | | | X/X | | | |
| 402 | Champagne (CH/n) | | | | | X/n | | | |
| 403 | Silver (Z/Z) | | | | | | X/X | | |
| 404 | Silver (Z/n) | | | | | | X/n | | |
| 405 | Cream (CR/CR) | | | | | | | X/X | |
| 406 | Cream (CR/n) | | | | | | | X/n | |
| 407 | Pearl (prl/prl) | | | | | | | | X/X |
| 408 | Pearl (prl/n) | | | | | | | | X/n |

TABLE 5
Referential table for genotypes of coat color modifications in combination with various coat color genotypes

| | Coat | | | | | | | | | | |
|---|---|---|---|---|---|---|---|---|---|---|---|
| | color + | | | | | | | | | | EDNRB_{—} |
| Modifi- | modifi- | Also | | | TBX3- | TBX3nd1- | | | | | TC_{—} |
| cation | cation | known as | ASIPA | BIEC2816500E | nd1 | alt | SLC36a1CH | PMEL17Z | SLC45A2CR | SLC45A2PRL | to_AG |
| Overo | Amber | Amber | X | X | X | X | X | n/n | n/n | n/n | X/n |
| | Dun | Cham- | | | | | | | | | |
| | Overo | pagne | | | | | | | | | |
| | | Dun | | | | | | | | | |
| | | Overo | | | | | | | | | |
| | Amber | Pseudo- | X | X | X | X | X | n/n | n/n | X/X | X/n |
| | Dun | cream | | | | | | | | | |
| | Pearl | Amber | | | | | | | | | |
| | Overo | Overo | | | | | | | | | |
| | Bay | | X | X | n/n | n/n | n/n | n/n | n/n | n/n | X/n |
| | Overo | | | | | | | | | | |
| | Black | | n/n | X | n/n | n/n | n/n | n/n | n/n | n/n | X/n |
| | Overo | | | | | | | | | | |
| | Buck- | | X | X | n/n | n/n | n/n | n/n | X/n | n/n | X/n |
| | skin | | | | | | | | | | |
| | Overo | | | | | | | | | | |
| | | Gold | n/n | n/n | n/n | n/n | X | n/n | n/n | n/n | X/n |
| | | Cham- | | | | | | | | | |
| | | pagne | | | | | | | | | |
| | | Overo | | | | | | | | | |
| | | Classic | n/n | X | n/n | n/n | X | n/n | n/n | n/n | X/n |
| | | Cham- | | | | | | | | | |
| | | pagne | | | | | | | | | |
| | | Overo | | | | | | | | | |
| | | Amber | X | X | n/n | n/n | X | n/n | n/n | n/n | X/n |
| | | Cham- | | | | | | | | | |
| | | pagne | | | | | | | | | |
| | | Overo | | | | | | | | | |
| | Cham- | Classic | n/n | X | X | X | X | n/n | n/n | n/n | X/n |
| | pagne | Cham- | | | | | | | | | |
| | Dun | pagne | | | | | | | | | |
| | Overo | Dun | | | | | | | | | |
| | | Overo | | | | | | | | | |
| | Cham- | Pseudo- | n/n | X | X | X | X | n/n | n/n | X/X | X/n |
| | pagne | cream | | | | | | | | | |
| | Dun | Classic | | | | | | | | | |
| | Pearl | Overo | | | | | | | | | |
| | Overo | | | | | | | | | | |
| | | Cham- | n/n | n/n | n/n | n/n | X | n/n | n/n | X/X | X/n |
| | | pagne | | | | | | | | | |
| | | Gold | | | | | | | | | |
| | | Pearl | | | | | | | | | |
| | | Overo | | | | | | | | | |
| | | Cham- | n/n | X | n/n | n/n | X | n/n | n/n | X/X | X/n |
| | | pagne | | | | | | | | | |
| | | Classic | | | | | | | | | |
| | | Pearl | | | | | | | | | |
| | | Overo | | | | | | | | | |
| | | Cham- | X | X | n/n | n/n | X | n/n | n/n | X/X | X/n |
| | | pagne | | | | | | | | | |
| | | Amber | | | | | | | | | |
| | | Pearl | | | | | | | | | |
| | | Overo | | | | | | | | | |
| | | Gold | n/n | n/n | n/n | n/n | X | n/n | X | n/n | X/n |
| | | Cream | | | | | | | | | |
| | | Overo | | | | | | | | | |
| | | Classic | n/n | X | n/n | n/n | X | n/n | X | n/n | X/n |
| | | Cream | | | | | | | | | |
| | | Overo | | | | | | | | | |
| | | Amber | X | X | n/n | n/n | X | n/n | X | n/n | X/n |
| | | Cream | | | | | | | | | |
| | | Overo | | | | | | | | | |
| | Cream | | n/n | X | X | X | n/n | n/n | X/X | n/n | X/n |
| | Grullo | | | | | | | | | | |
| | Overo | | | | | | | | | | |
| | | Chest- | n/n | n/n | n/n | n/n | n/n | n/n | X/n | X/n | X/n |
| | | nut | | | | | | | | | |
| | | Cream | | | | | | | | | |
| | | Pearl | | | | | | | | | |
| | | Overo | | | | | | | | | |
| | | Black | n/n | X | n/n | n/n | n/n | n/n | X/n | X/n | X/n |
| | | Cream | | | | | | | | | |
| | | Pearl | | | | | | | | | |
| | | Overo | | | | | | | | | |
| | | Bay | X | X | n/n | n/n | n/n | n/n | X/n | X/n | X/n |
| | | Cream | | | | | | | | | |
| | | Pearl | | | | | | | | | |
| | | Overo | | | | | | | | | |
| | Cremello | | n/n | n/n | n/n | n/n | n/n | n/n | X/X | n/n | X/n |
| | Overo | | | | | | | | | | |
| | | Red Dun | n/n | n/n | X | X | n/n | n/n | n/n | n/n | X/n |
| | | Overo | | | | | | | | | |
| | | Apricot | n/n | n/n | X | X | n/n | n/n | n/n | X/X | X/n |
| | | Dun | | | | | | | | | |
| | | Overo | | | | | | | | | |
| | | Gold | n/n | n/n | X | X | X | n/n | n/n | n/n | X/n |
| | | Dun | | | | | | | | | |
| | | Overo | | | | | | | | | |
| | | Classic | X | X | X | X | n/n | n/n | n/n | n/n | X/n |
| | | Dun | | | | | | | | | |
| | | Overo | | | | | | | | | |
| | | Dun | n/n | X | X | X | n/n | n/n | n/n | X/X | X/n |
| | | Pearl | | | | | | | | | |
| | | Black | | | | | | | | | |
| | | Overo | | | | | | | | | |
| | | Dun | X | X | X | X | n/n | n/n | n/n | X/X | X/n |
| | | Pearl | | | | | | | | | |
| | | Bay | | | | | | | | | |
| | | Overo | | | | | | | | | |
| | Dunolino | | n/n | n/n | X | X | n/n | n/n | X/n | n/n | X/n |
| | Overo | | | | | | | | | | |
| | Dunskin | | X | X | X | X | n/n | n/n | X/n | n/n | X/n |
| | Overo | | | | | | | | | | |
| | Gold Dun | Pseudo- | n/n | n/n | X | X | X | n/n | n/n | X/X | X/n |
| | Pearl | cream | | | | | | | | | |
| | Overo | Gold | | | | | | | | | |
| | | Overo | | | | | | | | | |
| | Grullo | | n/n | X | X | X | n/n | n/n | n/n | n/n | X/n |
| | Overo | | | | | | | | | | |
| | Palomino | | | n/n | n/n | n/n | n/n | n/n | X/n | n/n | X/n |
| | Overo | | | | | | | | | | |
| | | Apricot | n/n | n/n | n/n | n/n | n/n | n/n | n/n | X/X | X/n |
| | | Pearl | | | | | | | | | |
| | | Overo | | | | | | | | | |
| | | Black | n/n | X | n/n | n/n | n/n | n/n | n/n | X/X | X/n |
| | | Pearl | | | | | | | | | |
| | | Overo | | | | | | | | | |
| | | Bay | X | X | n/n | n/n | n/n | n/n | n/n | X/X | X/n |
| | | Pearl | | | | | | | | | |
| | | Over | | | | | | | | | |
| | Perlino | | X | X | n/n | n/n | n/n | n/n | X/X | n/n | X/n |
| | Overo | | | | | | | | | | |
| | Perlino | | X | X | X | X | n/n | n/n | X/X | n/n | X/n |
| | Dun | | | | | | | | | | |
| | Overo | | | | | | | | | | |
| | Red | Chest- | | n/n | n/n | n/n | n/n | n/n | n/n | n/n | X/n |
| | Overo | nut, | | | | | | | | | |
| | | Sorrel | | | | | | | | | |
| | | Overo | | | | | | | | | |
| | Silver | Silver | X | X | X | X | X | X | n/n | n/n | X/n |
| | Amber | Amber | | | | | | | | | |
| | Dun | Cham- | | | | | | | | | |
| | Overo | pagne | | | | | | | | | |
| | | Dun | | | | | | | | | |
| | | Overo | | | | | | | | | |
| | | Silver | n/n | X | n/n | n/n | X | X | n/n | n/n | X/n |
| | | Classic | | | | | | | | | |
| | | Cham- | | | | | | | | | |
| | | pagne | | | | | | | | | |
| | | Overo | | | | | | | | | |
| | | Silver | X | X | n/n | n/n | X | X | n/n | n/n | X/n |
| | | Amber | | | | | | | | | |
| | | Cham- | | | | | | | | | |
| | | pagne | | | | | | | | | |
| | | Overo | | | | | | | | | |
| | Silver | | n/n | X | X | X | X | X | n/n | n/n | X/n |
| | Cham- | | | | | | | | | | |
| | pagne | | | | | | | | | | |
| | Dun | | | | | | | | | | |
| | Overo | | | | | | | | | | |
| | | Silver | n/n | X | n/n | n/n | X | X | n/n | X/X | X/n |
| | | Classic | | | | | | | | | |
| | | Cham- | | | | | | | | | |
| | | pagne | | | | | | | | | |
| | | Pearl | | | | | | | | | |
| | | Overo | | | | | | | | | |
| | | Silver | X | X | n/n | n/n | X | X | n/n | X/X | X/n |
| | | Classic | | | | | | | | | |
| | | Amber | | | | | | | | | |
| | | Pearl | | | | | | | | | |
| | | Overo | | | | | | | | | |
| | | Silver | n/n | X | n/n | n/n | n/n | X | X/n | X/n | X/n |
| | | Black | | | | | | | | | |
| | | Cream | | | | | | | | | |
| | | Pearl | | | | | | | | | |
| | | Overo | | | | | | | | | |
| | | Silver | X | X | n/n | n/n | n/n | X | X/n | X/n | X/n |
| | | Bay | | | | | | | | | |
| | | Cream | | | | | | | | | |
| | | Pearl | | | | | | | | | |
| | | Overo | | | | | | | | | |
| | Silver | Silver | n/n | X | n/n | n/n | n/n | X | n/n | n/n | X/n |
| | Dapple | Black | | | | | | | | | |
| | Overo | Overo | | | | | | | | | |
| | Silver | | X | X | n/n | n/n | n/n | X | n/n | n/n | X/n |
| | Bay | | | | | | | | | | |
| | Overo | | | | | | | | | | |
| | Silver | | X | X | n/n | n/n | n/n | X | X/n | n/n | X/n |
| | Buck- | | | | | | | | | | |
| | skin | | | | | | | | | | |
| | Overo | | | | | | | | | | |
| | Silver | | n/n | X | X | X | n/n | X | X/X | n/n | X/n |
| | Cream | | | | | | | | | | |
| | Grullo | | | | | | | | | | |
| | Overo | | | | | | | | | | |
| | Silver | Silver | | X | X | X | n/n | X | n/n | n/n | X/n |
| | Dun | Dapple | | | | | | | | | |
| | Overo | Dun | | | | | | | | | |
| | | Overo | | | | | | | | | |
| | Silver | Silver | X | X | X | X | n/n | X | X/n | n/n | X/n |
| | Dunskin | Dun Bay | | | | | | | | | |
| | Overo | Cream | | | | | | | | | |
| | | Overo | | | | | | | | | |
| | Silver | Silver | n/n | X | X | X | n/n | X | n/n | n/n | X/n |
| | Grullo | Dun | | | | | | | | | |
| | Overo | Black | | | | | | | | | |
| | | Overo | | | | | | | | | |
| | | Silver | n/n | X | n/n | n/n | n/n | X | n/n | X/X | X/n |
| | | Pearl | | | | | | | | | |
| | | Black | | | | | | | | | |
| | | Overo | | | | | | | | | |
| | | Silver | X | X | n/n | n/n | n/n | X | n/n | X/X | X/n |
| | | Pearl | | | | | | | | | |
| | | Bay | | | | | | | | | |
| | | Overo | | | | | | | | | |
| | Silver | | X | X | n/n | n/n | n/n | X | X/X | n/n | X/n |
| | Perlino | | | | | | | | | | |
| | Overo | | | | | | | | | | |
| | Silver | | X | X | X | X | n/n | X | X/X | n/n | X/n |
| | Perlino | | | | | | | | | | |
| | Dun | | | | | | | | | | |
| | Overo | | | | | | | | | | |
| | | Silver | n/n | X | X | X | n/n | X | n/n | X/X | X/n |
| | | Dun | | | | | | | | | |
| | | Pearl | | | | | | | | | |
| | | Black | | | | | | | | | |
| | | Overo | | | | | | | | | |
| | | Silver | X | X | X | X | n/n | X | n/n | X/X | X/n |
| | | Dun | | | | | | | | | |
| | | Pearl | | | | | | | | | |
| | | Bay | | | | | | | | | |
| | | Overo | | | | | | | | | |
| | Silver | | n/n | X | n/n | n/n | n/n | X | X/X | n/n | X/n |
| | Smoky | | | | | | | | | | |
| | Cream | | | | | | | | | | |
| | Overo | | | | | | | | | | |
| | Smoky | Black | n/n | X | n/n | n/n | n/n | n/n | X/n | n/n | X/n |
| | Black | Cream | | | | | | | | | |
| | Overo | Overo | | | | | | | | | |
| | Smoky | | n/n | X | n/n | n/n | n/n | n/n | X/X | n/n | X/n |
| | Cream | | | | | | | | | | |
| | Overo | | | | | | | | | | |
| | Smoky | Dun | n/n | X | X | X | n/n | n/n | X/n | n/n | X/n |
| | Grullo | Black | | | | | | | | | |
| | Overo | Cream | | | | | | | | | |
| | | Overo | | | | | | | | | |
| | Cham- | | | | | | X | | | X/X | X/n |
| | pagne | | | | | | | | | | |
| | Pearl | | | | | | | | | | |
| | Overo | | | | | | | | | | |
| | Cream | | | | | | | | X/n | X/n | X/n |
| | Pearl | | | | | | | | | | |
| | Overo | | | | | | | | | | |
| | Dun | | | | X | X | | | | X/X | X/n |
| | Pearl | | | | | | | | | | |
| | Overo | | | | | | | | | | |
| | Silver | | | | | | X | X | | | X/n |
| | Cham- | | | | | | | | | | |
| | pagne | | | | | | | | | | |
| | Overo | | | | | | | | | | |
| | Silver | | | | | | X | X | | X/X | X/n |
| | Cham- | | | | | | | | | | |
| | pagne | | | | | | | | | | |
| | Pearl | | | | | | | | | | |
| | Overo | | | | | | | | | | |
| | Silver | | | | | | | X | X/n | X/n | X/n |
| | Cream | | | | | | | | | | |
| | Pearl | | | | | | | | | | |
| | Overo | | | | | | | | | | |
| | Silver | | | X | | | | X | | X/X | X/n |
| | Pearl | | | | | | | | | | |
| | Overo | | | | | | | | | | |
| | Silver | | | X | X | X | | X | | X/X | X/n |
| | Dun | | | | | | | | | | |
| | Pearl | | | | | | | | | | |
| | Overo | | | | | | | | | | |
| | Silver | Silver | X | X | | | | X | X | | X/n |
| | Bay | Buck- | | | | | | | | | |
| | Cream | skin | | | | | | | | | |
| | Overo | Overo | | | | | | | | | |
| Tovero | Amber | Amber | X | X | X | X | X | n/n | n/n | n/n | X/n |
| | Dun | Cham- | | | | | | | | | |
| | Tovero | pagne | | | | | | | | | |
| | | Dun | | | | | | | | | |
| | | Tovero | | | | | | | | | |
| | Amber | Pseudo- | X | X | X | X | X | n/n | n/n | X/X | X/n |
| | Dun | cream | | | | | | | | | |
| | Pearl | Amber | | | | | | | | | |
| | Tovero | Tovero | | | | | | | | | |
| | Bay | | X | X | n/n | n/n | n/n | n/n | n/n | n/n | X/n |
| | Tovero | | | | | | | | | | |
| | Black | | n/n | X | n/n | n/n | n/n | n/n | n/n | n/n | X/n |
| | Tovero | | | | | | | | | | |
| | Buck- | | X | X | n/n | n/n | n/n | n/n | X/n | n/n | X/n |
| | skin | | | | | | | | | | |
| | Tovero | | | | | | | | | | |
| | | Gold | n/n | n/n | n/n | n/n | X | n/n | n/n | n/n | X/n |
| | | Cham- | | | | | | | | | |
| | | pagne | | | | | | | | | |
| | | Tovero | | | | | | | | | |
| | | Classic | n/n | X | n/n | n/n | X | n/n | n/n | n/n | X/n |
| | | Cham- | | | | | | | | | |
| | | pagne | | | | | | | | | |
| | | Tovero | | | | | | | | | |
| | | Amber | X | X | n/n | n/n | X | n/n | n/n | n/n | X/n |
| | | Cham- | | | | | | | | | |
| | | pagne | | | | | | | | | |
| | | Tovero | | | | | | | | | |
| | Cham- | Classic | n/n | X | X | X | X | n/n | n/n | n/n | X/n |
| | pagne | Cham- | | | | | | | | | |
| | Dun | pagne | | | | | | | | | |
| | Tovero | Dun | | | | | | | | | |
| | | Tovero | | | | | | | | | |
| | Cham- | Pseudo- | n/n | X | X | X | X | n/n | n/n | X/X | X/n |
| | pagne | cream | | | | | | | | | |
| | Dun | Classic | | | | | | | | | |
| | Pearl | Tovero | | | | | | | | | |
| | Tovero | | | | | | | | | | |
| | | Cham- | n/n | n/n | n/n | n/n | X | n/n | n/n | X/X | X/n |
| | | pagne | | | | | | | | | |
| | | Gold | | | | | | | | | |
| | | Pearl | | | | | | | | | |
| | | Tovero | | | | | | | | | |
| | | Cham- | n/n | X | n/n | n/n | X | n/n | n/n | X/X | X/n |
| | | pagne | | | | | | | | | |
| | | Classic | | | | | | | | | |
| | | Pearl | | | | | | | | | |
| | | Tovero | | | | | | | | | |
| | | Cham- | X | X | n/n | n/n | X | n/n | n/n | X/X | X/n |
| | | pagne | | | | | | | | | |
| | | Amber | | | | | | | | | |
| | | Pearl | | | | | | | | | |
| | | Tovero | | | | | | | | | |
| | | Gold | n/n | n/n | n/n | n/n | X | n/n | X | n/n | X/n |
| | | Cream | | | | | | | | | |
| | | Tovero | | | | | | | | | |
| | | Classic | n/n | X | n/n | n/n | X | n/n | X | n/n | X/n |
| | | Cream | | | | | | | | | |
| | | Tovero | | | | | | | | | |
| | | Amber | X | X | n/n | n/n | X | n/n | X | n/n | X/n |
| | | Cream | | | | | | | | | |
| | | Tovero | | | | | | | | | |
| | Cream | | n/n | X | X | X | n/n | n/n | X/X | n/n | X/n |
| | Grullo | | | | | | | | | | |
| | Tovero | | | | | | | | | | |
| | | Chest- | n/n | n/n | n/n | n/n | n/n | n/n | X/n | X/n | X/n |
| | | nut | | | | | | | | | |
| | | Cream | | | | | | | | | |
| | | Pearl | | | | | | | | | |
| | | Tovero | | | | | | | | | |
| | | Black | n/n | X | n/n | n/n | n/n | n/n | X/n | X/n | X/n |
| | | Cream | | | | | | | | | |
| | | Pearl | | | | | | | | | |
| | | Tovero | | | | | | | | | |
| | | Bay | X | X | n/n | n/n | n/n | n/n | X/n | X/n | X/n |
| | | Cream | | | | | | | | | |
| | | Pearl | | | | | | | | | |
| | | Tovero | | | | | | | | | |
| | Cremello | | n/n | n/n | n/n | n/n | n/n | n/n | X/X | n/n | X/n |
| | Tovero | | | | | | | | | | |
| | | Red Dun | n/n | n/n | X | X | n/n | n/n | n/n | n/n | X/n |
| | | Tovero | | | | | | | | | |
| | | Apricot | n/n | n/n | X | X | n/n | n/n | n/n | X/X | X/n |
| | | Dun | | | | | | | | | |
| | | Tovero | | | | | | | | | |
| | | Gold | n/n | n/n | X | X | X | n/n | n/n | n/n | X/n |
| | | Dun | | | | | | | | | |
| | | Tovero | | | | | | | | | |
| | | Classic | X | X | X | X | n/n | n/n | n/n | n/n | X/n |
| | | Dun | | | | | | | | | |
| | | Tovero | | | | | | | | | |
| | | Dun | n/n | X | X | X | n/n | n/n | n/n | X/X | X/n |
| | | Pearl | | | | | | | | | |
| | | Black | | | | | | | | | |
| | | Tovero | | | | | | | | | |
| | | Dun | X | X | X | X | n/n | n/n | n/n | X/X | X/n |
| | | Pearl | | | | | | | | | |
| | | Bay | | | | | | | | | |
| | | Tovero | | | | | | | | | |
| | Dunolino | | n/n | n/n | X | X | n/n | n/n | X/n | n/n | X/n |
| | Tovero | | | | | | | | | | |
| | Dunskin | | X | X | X | X | n/n | n/n | X/n | n/n | X/n |
| | Tovero | | | | | | | | | | |
| | Gold | Pseudo- | n/n | n/n | X | X | X | n/n | n/n | X/X | X/n |
| | Dun | cream | | | | | | | | | |
| | Pearl | Gold | | | | | | | | | |
| | Tovero | Tovero | | | | | | | | | |
| | Grullo | | n/n | X | X | X | n/n | n/n | n/n | n/n | X/n |
| | Tovero | | | | | | | | | | |
| | Palomino | | | n/n | n/n | n/n | n/n | n/n | X/n | n/n | X/n |
| | Tovero | | | | | | | | | | |
| | | Apricot | n/n | n/n | n/n | n/n | n/n | n/n | n/n | X/X | X/n |
| | | Pearl | | | | | | | | | |
| | | Tovero | | | | | | | | | |
| | | Black | n/n | X | n/n | n/n | n/n | n/n | n/n | X/X | X/n |
| | | Pearl | | | | | | | | | |
| | | Tovero | | | | | | | | | |
| | | Bay | X | X | n/n | n/n | n/n | n/n | n/n | X/X | X/n |
| | | Pearl | | | | | | | | | |
| | | Tovero | | | | | | | | | |
| | Perlino | | X | X | n/n | n/n | n/n | n/n | X/X | n/n | X/n |
| | Tovero | | | | | | | | | | |
| | Perlino | | X | X | X | X | n/n | n/n | X/X | n/n | X/n |
| | Dun | | | | | | | | | | |
| | Tovero | | | | | | | | | | |
| | Red | Chest- | | n/n | n/n | n/n | n/n | n/n | n/n | n/n | X/n |
| | Tovero | nut, | | | | | | | | | |
| | | Sorrel | | | | | | | | | |
| | | Tovero | | | | | | | | | |
| | Silver | Silver | X | X | X | X | X | X | n/n | n/n | X/n |
| | Amber | Amber | | | | | | | | | |
| | Dun | Cham- | | | | | | | | | |
| | Tovero | pagne | | | | | | | | | |
| | | Dun | | | | | | | | | |
| | | Tovero | | | | | | | | | |
| | | Silver | n/n | X | n/n | n/n | X | X | n/n | n/n | X/n |
| | | Classic | | | | | | | | | |
| | | Cham- | | | | | | | | | |
| | | pagne | | | | | | | | | |
| | | Tovero | | | | | | | | | |
| | | Silver | X | X | n/n | n/n | X | X | n/n | n/n | X/n |
| | | Amber | | | | | | | | | |
| | | Cham- | | | | | | | | | |
| | | pagne | | | | | | | | | |
| | | Tovero | | | | | | | | | |
| | Silver | | n/n | X | X | X | X | X | n/n | n/n | X/n |
| | Cham- | | | | | | | | | | |
| | pagne | | | | | | | | | | |
| | Dun | | | | | | | | | | |
| | Tovero | | | | | | | | | | |
| | | Silver | n/n | X | n/n | n/n | X | X | n/n | X/X | X/n |
| | | Classic | | | | | | | | | |
| | | Cham- | | | | | | | | | |
| | | pagne | | | | | | | | | |
| | | Pearl | | | | | | | | | |
| | | Tovero | | | | | | | | | |
| | | Silver | X | X | n/n | n/n | X | X | n/n | X/X | X/n |
| | | Classic | | | | | | | | | |
| | | Amber | | | | | | | | | |
| | | Pearl | | | | | | | | | |
| | | Tovero | | | | | | | | | |
| | | Silver | n/n | X | n/n | n/n | n/n | X | X/n | X/n | X/n |
| | | Black | | | | | | | | | |
| | | Cream | | | | | | | | | |
| | | Pearl | | | | | | | | | |
| | | Tovero | | | | | | | | | |
| | | Silver | X | X | n/n | n/n | n/n | X | X/n | X/n | X/n |
| | | Bay | | | | | | | | | |
| | | Cream | | | | | | | | | |
| | | Pearl | | | | | | | | | |
| | | Tovero | | | | | | | | | |
| | Silver | Silver | n/n | X | n/n | n/n | n/n | X | n/n | n/n | X/n |
| | Dapple | Black | | | | | | | | | |
| | Tovero | Tovero | | | | | | | | | |
| | Silver | | X | X | n/n | n/n | n/n | X | n/n | n/n | X/n |
| | Bay | | | | | | | | | | |
| | Tovero | | | | | | | | | | |
| | Silver | | X | X | n/n | n/n | n/n | X | X/n | n/n | X/n |
| | Buck- | | | | | | | | | | |
| | skin | | | | | | | | | | |
| | Tovero | | | | | | | | | | |
| | Silver | | n/n | X | X | X | n/n | X | X/X | n/n | X/n |
| | Cream | | | | | | | | | | |
| | Grullo | | | | | | | | | | |
| | Tovero | | | | | | | | | | |
| | Silver | Silver | | X | X | X | n/n | X | n/n | n/n | X/n |
| | Dun | Dapple | | | | | | | | | |
| | Tovero | Dun | | | | | | | | | |
| | | Tovero | | | | | | | | | |
| | Silver | Silver | X | X | X | X | n/n | X | X/n | n/n | X/n |
| | Dunskin | Dun Bay | | | | | | | | | |
| | Tovero | Cream | | | | | | | | | |
| | | Tovero | | | | | | | | | |
| | Silver | Silver | n/n | X | X | X | n/n | X | n/n | n/n | X/n |
| | Grullo | Dun | | | | | | | | | |
| | Tovero | Black | | | | | | | | | |
| | | Tovero | | | | | | | | | |
| | | Silver | n/n | X | n/n | n/n | n/n | X | n/n | X/X | X/n |
| | | Pearl | | | | | | | | | |
| | | Black | | | | | | | | | |
| | | Tovero | | | | | | | | | |
| | | Silver | X | X | n/n | n/n | n/n | X | n/n | X/X | X/n |
| | | Pearl | | | | | | | | | |
| | | Bay | | | | | | | | | |
| | | Tovero | | | | | | | | | |
| | Silver | | X | X | n/n | n/n | n/n | X | X/X | n/n | X/n |
| | Perlino | | | | | | | | | | |
| | Tovero | | | | | | | | | | |
| | Silver | | X | X | X | X | n/n | X | X/X | n/n | X/n |
| | Perlino | | | | | | | | | | |
| | Dun | | | | | | | | | | |
| | Tovero | | | | | | | | | | |
| | | Silver | n/n | X | X | X | n/n | X | n/n | X/X | X/n |
| | | Dun | | | | | | | | | |
| | | Pearl | | | | | | | | | |
| | | Black | | | | | | | | | |
| | | Tovero | | | | | | | | | |
| | | Silver | X | X | X | X | n/n | X | n/n | X/X | X/n |
| | | Dun | | | | | | | | | |
| | | Pearl | | | | | | | | | |
| | | Bay | | | | | | | | | |
| | | Tovero | | | | | | | | | |
| | Silver | | n/n | X | n/n | n/n | n/n | X | X/X | n/n | X/n |
| | Smoky | | | | | | | | | | |
| | Cream | | | | | | | | | | |
| | Tovero | | | | | | | | | | |
| | Smoky | Black | n/n | X | n/n | n/n | n/n | n/n | X/n | n/n | X/n |
| | Black | Cream | | | | | | | | | |
| | Tovero | Tovero | | | | | | | | | |
| | Smoky | | n/n | X | n/n | n/n | n/n | n/n | X/X | n/n | X/n |
| | Cream | | | | | | | | | | |
| | Tovero | | | | | | | | | | |
| | Smoky | Dun | n/n | X | X | X | n/n | n/n | X/n | n/n | X/n |
| | Grullo | Black | | | | | | | | | |
| | Tovero | Cream | | | | | | | | | |
| | | Tovero | | | | | | | | | |
| | Cham- | | | | | | X | | | X/X | X/n |
| | pagne | | | | | | | | | | |
| | Pearl | | | | | | | | | | |
| | Tovero | | | | | | | | | | |
| | Cream | | | | | | | | X/n | X/n | X/n |
| | Pearl | | | | | | | | | | |
| | Tovero | | | | | | | | | | |
| | Dun | | | | X | X | | | | X/X | X/n |
| | Pearl | | | | | | | | | | |
| | Tovero | | | | | | | | | | |
| | Silver | | | | | | X | X | | | X/n |
| | Cham- | | | | | | | | | | |
| | pagne | | | | | | | | | | |
| | Tovero | | | | | | | | | | |
| | Silver | | | | | | X | X | | X/X | X/n |
| | Cham- | | | | | | | | | | |
| | pagne | | | | | | | | | | |
| | Pearl | | | | | | | | | | |
| | Tovero | | | | | | | | | | |
| | Silver | | | | | | | X | X/n | X/n | X/n |
| | Cream | | | | | | | | | | |
| | Pearl | | | | | | | | | | |
| | Tovero | | | | | | | | | | |
| | Silver | | | X | | | | X | | X/X | X/n |
| | Pearl | | | | | | | | | | |
| | Tovero | | | | | | | | | | |
| | Silver | | | X | X | X | | X | | X/X | X/n |
| | Dun | | | | | | | | | | |
| | Pearl | | | | | | | | | | |
| | Tovero | | | | | | | | | | |
| | Silver | Silver | X | X | | | | X | X | | X/n |
| | Bay | Buck- | | | | | | | | | |
| | Cream | skin | | | | | | | | | |
| | Tovero | Tovero | | | | | | | | | |
| Splash | Amber | Amber | X | X | X | X | X | n/n | n/n | n/n | |
| | Dun | Cham- | | | | | | | | | |
| | Splash | pagne | | | | | | | | | |
| | | Dun | | | | | | | | | |
| | | Splash | | | | | | | | | |
| | Amber | Pseudo- | X | X | X | X | X | n/n | n/n | X/X | |
| | Dun | cream | | | | | | | | | |
| | Pearl | Amber | | | | | | | | | |
| | Splash | Splash | | | | | | | | | |
| | Bay | | X | X | n/n | n/n | n/n | n/n | n/n | n/n | |
| | Splash | | | | | | | | | | |
| | Black | | n/n | X | n/n | n/n | n/n | n/n | n/n | n/n | |
| | Splash | | | | | | | | | | |
| | Buck- | | X | X | n/n | n/n | n/n | n/n | X/n | n/n | |
| | skin | | | | | | | | | | |
| | Splash | | | | | | | | | | |
| | | Gold | n/n | n/n | n/n | n/n | X | n/n | n/n | n/n | |
| | | Cham- | | | | | | | | | |
| | | pagne | | | | | | | | | |
| | | Splash | | | | | | | | | |
| | | Classic | n/n | X | n/n | n/n | X | n/n | n/n | n/n | |
| | | Cham- | | | | | | | | | |
| | | pagne | | | | | | | | | |
| | | Splash | | | | | | | | | |
| | | Amber | X | X | n/n | n/n | X | n/n | n/n | n/n | |
| | | Cham- | | | | | | | | | |
| | | pagne | | | | | | | | | |
| | | Splash | | | | | | | | | |
| | Cham- | Classic | n/n | X | X | X | X | n/n | n/n | n/n | |
| | pagne | Cham- | | | | | | | | | |
| | Dun | pagne | | | | | | | | | |
| | Splash | Dun | | | | | | | | | |
| | | Splash | | | | | | | | | |
| | Cham- | Pseudo- | n/n | X | X | X | X | n/n | n/n | X/X | |
| | pagne | cream | | | | | | | | | |
| | Dun | Classic | | | | | | | | | |
| | Pearl | Splash | | | | | | | | | |
| | Splash | | | | | | | | | | |
| | | Cham- | n/n | n/n | n/n | n/n | X | n/n | n/n | X/X | |
| | | pagne | | | | | | | | | |
| | | Gold | | | | | | | | | |
| | | Pearl | | | | | | | | | |
| | | Splash | | | | | | | | | |
| | | Cham- | n/n | X | n/n | n/n | X | n/n | n/n | X/X | |
| | | pagne | | | | | | | | | |
| | | Classic | | | | | | | | | |
| | | Pearl | | | | | | | | | |
| | | Splash | | | | | | | | | |
| | | Cham- | X | X | n/n | n/n | X | n/n | n/n | X/X | |
| | | pagne | | | | | | | | | |
| | | Amber | | | | | | | | | |
| | | Pearl | | | | | | | | | |
| | | Splash | | | | | | | | | |
| | | Gold | n/n | n/n | n/n | n/n | X | n/n | X | n/n | |
| | | Cream | | | | | | | | | |
| | | Splash | | | | | | | | | |
| | | Classic | n/n | X | n/n | n/n | X | n/n | X | n/n | |
| | | Cream | | | | | | | | | |
| | | Splash | | | | | | | | | |
| | | Amber | X | X | n/n | n/n | X | n/n | X | n/n | |
| | | Cream | | | | | | | | | |
| | | Splash | | | | | | | | | |
| | Cream | | n/n | X | X | X | n/n | n/n | X/X | n/n | |
| | Grullo | | | | | | | | | | |
| | Splash | | | | | | | | | | |
| | | Chest- | n/n | n/n | n/n | n/n | n/n | n/n | X/n | X/n | |
| | | nut | | | | | | | | | |
| | | Cream | | | | | | | | | |
| | | Pearl | | | | | | | | | |
| | | Splash | | | | | | | | | |
| | | Black | n/n | X | n/n | n/n | n/n | n/n | X/n | X/n | |
| | | Cream | | | | | | | | | |
| | | Pearl | | | | | | | | | |
| | | Splash | | | | | | | | | |
| | | Bay | X | X | n/n | n/n | n/n | n/n | X/n | X/n | |
| | | Cream | | | | | | | | | |
| | | Pearl | | | | | | | | | |
| | | Splash | | | | | | | | | |
| | Cremello | | n/n | n/n | n/n | n/n | n/n | n/n | X/X | n/n | |
| | Splash | | | | | | | | | | |
| | | Red Dun | n/n | n/n | X | X | n/n | n/n | n/n | n/n | |
| | | Splash | | | | | | | | | |
| | | Apricot | n/n | n/n | X | X | n/n | n/n | n/n | X/X | |
| | | Dun | | | | | | | | | |
| | | Splash | | | | | | | | | |
| | | Gold | n/n | n/n | X | X | X | n/n | n/n | n/n | |
| | | Dun | | | | | | | | | |
| | | Splash | | | | | | | | | |
| | | Classic | X | X | X | X | n/n | n/n | n/n | n/n | |
| | | Dun | | | | | | | | | |
| | | Splash | | | | | | | | | |
| | | Dun | n/n | X | X | X | n/n | n/n | n/n | X/X | |
| | | Pearl | | | | | | | | | |
| | | Black | | | | | | | | | |
| | | Splash | | | | | | | | | |
| | | Dun | X | X | X | X | n/n | n/n | n/n | X/X | |
| | | Pearl | | | | | | | | | |
| | | Bay | | | | | | | | | |
| | | Splash | | | | | | | | | |
| | Dunolino | | n/n | n/n | X | X | n/n | n/n | X/n | n/n | |
| | Splash | | | | | | | | | | |
| | Dunskin | | X | X | X | X | n/n | n/n | X/n | n/n | |
| | Splash | | | | | | | | | | |
| | Gold | Pseudo- | n/n | n/n | X | X | X | n/n | n/n | X/X | |
| | Dun | cream | | | | | | | | | |
| | Pearl | Gold | | | | | | | | | |
| | Splash | Splash | | | | | | | | | |
| | Grullo | | n/n | X | X | X | n/n | n/n | n/n | n/n | |
| | Splash | | | | | | | | | | |
| | Palomino | | | n/n | n/n | n/n | n/n | n/n | X/n | n/n | |
| | Splash | | | | | | | | | | |
| | | Apricot | n/n | n/n | n/n | n/n | n/n | n/n | n/n | X/X | |
| | | Pearl | | | | | | | | | |
| | | Splash | | | | | | | | | |
| | | Black | n/n | X | n/n | n/n | n/n | n/n | n/n | X/X | |
| | | Pearl | | | | | | | | | |
| | | Splash | | | | | | | | | |
| | | Bay | X | X | n/n | n/n | n/n | n/n | n/n | X/X | |
| | | Pearl | | | | | | | | | |
| | | Splash | | | | | | | | | |
| | Perlino | | X | X | n/n | n/n | n/n | n/n | X/X | n/n | |
| | Splash | | | | | | | | | | |
| | Perlino | | X | X | X | X | n/n | n/n | X/X | n/n | |
| | Dun | | | | | | | | | | |
| | Splash | | | | | | | | | | |
| | Red | Chest- | | n/n | n/n | n/n | n/n | n/n | n/n | n/n | |
| | Splash | nut, | | | | | | | | | |
| | | Sorrel | | | | | | | | | |
| | | Splash | | | | | | | | | |
| | Silver | Silver | X | X | X | X | X | X | n/n | n/n | |
| | Amber | Amber | | | | | | | | | |
| | Dun | Cham- | | | | | | | | | |
| | Splash | pagne | | | | | | | | | |
| | | Dun | | | | | | | | | |
| | | Splash | | | | | | | | | |
| | | Silver | n/n | X | n/n | n/n | X | X | n/n | n/n | |
| | | Classic | | | | | | | | | |
| | | Cham- | | | | | | | | | |
| | | pagne | | | | | | | | | |
| | | Splash | | | | | | | | | |
| | | Silver | X | X | n/n | n/n | X | X | n/n | n/n | |
| | | Amber | | | | | | | | | |
| | | Cham- | | | | | | | | | |
| | | pagne | | | | | | | | | |
| | | Splash | | | | | | | | | |
| | Silver | | n/n | X | X | X | X | X | n/n | n/n | |
| | Cham- | | | | | | | | | | |
| | pagne | | | | | | | | | | |
| | Dun | | | | | | | | | | |
| | Splash | | | | | | | | | | |
| | | Silver | n/n | X | n/n | n/n | X | X | n/n | X/X | |
| | | Classic | | | | | | | | | |
| | | Cham- | | | | | | | | | |
| | | pagne | | | | | | | | | |
| | | Pearl | | | | | | | | | |
| | | Splash | | | | | | | | | |
| | | Silver | X | X | n/n | n/n | X | X | n/n | X/X | |
| | | Classic | | | | | | | | | |
| | | Amber | | | | | | | | | |
| | | Pearl | | | | | | | | | |
| | | Splash | | | | | | | | | |
| | | Silver | n/n | X | n/n | n/n | n/n | X | X/n | X/n | |
| | | Black | | | | | | | | | |
| | | Cream | | | | | | | | | |
| | | Pearl | | | | | | | | | |
| | | Splash | | | | | | | | | |
| | | Silver | X | X | n/n | n/n | n/n | X | X/n | X/n | |
| | | Bay | | | | | | | | | |
| | | Cream | | | | | | | | | |
| | | Pearl | | | | | | | | | |
| | | Splash | | | | | | | | | |
| | Silver | Silver | n/n | X | n/n | n/n | n/n | X | n/n | n/n | |
| | Dapple | Black | | | | | | | | | |
| | Splash | Splash | | | | | | | | | |
| | Silver | | X | X | n/n | n/n | n/n | X | n/n | n/n | |
| | Bay | | | | | | | | | | |
| | Splash | | | | | | | | | | |
| | Silver | | X | X | n/n | n/n | n/n | X | X/n | n/n | |
| | Buck- | | | | | | | | | | |
| | skin | | | | | | | | | | |
| | Splash | | | | | | | | | | |
| | Silver | | n/n | X | X | X | n/n | X | X/X | n/n | |
| | Cream | | | | | | | | | | |
| | Grullo | | | | | | | | | | |
| | Splash | | | | | | | | | | |
| | Silver | Silver | | X | X | X | n/n | X | n/n | n/n | |
| | Dun | Dapple | | | | | | | | | |
| | Splash | Dun | | | | | | | | | |
| | | Splash | | | | | | | | | |
| | Silver | Dun Bay | X | X | X | X | n/n | X | X/n | n/n | |
| | Dunskin | Silver | | | | | | | | | |
| | Splash | Cream | | | | | | | | | |
| | | Splash | | | | | | | | | |
| | Silver | Silver | n/n | X | X | X | n/n | X | n/n | n/n | |
| | Grullo | Dun | | | | | | | | | |
| | Splash | Black | | | | | | | | | |
| | | Splash | | | | | | | | | |
| | | Silver | n/n | X | n/n | n/n | n/n | X | n/n | X/X | |
| | | Pearl | | | | | | | | | |
| | | Black | | | | | | | | | |
| | | Splash | | | | | | | | | |
| | | Silver | X | X | n/n | n/n | n/n | X | n/n | X/X | |
| | | Pearl | | | | | | | | | |
| | | Bay | | | | | | | | | |
| | | Splash | | | | | | | | | |
| | Silver | | X | X | n/n | n/n | n/n | X | X/X | n/n | |
| | Perlino | | | | | | | | | | |
| | Splash | | | | | | | | | | |
| | Silver | | X | X | X | X | n/n | X | X/X | n/n | |
| | Perlino | | | | | | | | | | |
| | Dun | | | | | | | | | | |
| | Splash | | | | | | | | | | |
| | | Silver | n/n | X | X | X | n/n | X | n/n | X/X | |
| | | Dun | | | | | | | | | |
| | | Pearl | | | | | | | | | |
| | | Black | | | | | | | | | |
| | | Splash | | | | | | | | | |
| | | Silver | X | X | X | X | n/n | X | n/n | X/X | |
| | | Dun | | | | | | | | | |
| | | Pearl | | | | | | | | | |
| | | Bay | | | | | | | | | |
| | | Splash | | | | | | | | | |
| | Silver | | n/n | X | n/n | n/n | n/n | X | X/X | n/n | |
| | Smoky | | | | | | | | | | |
| | Cream | | | | | | | | | | |
| | Splash | | | | | | | | | | |
| | Smoky | Black | n/n | X | n/n | n/n | n/n | n/n | X/n | n/n | |
| | Black | Cream | | | | | | | | | |
| | Splash | Splash | | | | | | | | | |
| | Smoky | | n/n | X | n/n | n/n | n/n | n/n | X/X | n/n | |
| | Cream | | | | | | | | | | |
| | Splash | | | | | | | | | | |
| | Smoky | Dun | n/n | X | X | X | n/n | n/n | X/n | n/n | |
| | Grullo | Black | | | | | | | | | |
| | Splash | Cream | | | | | | | | | |
| | | Splash | | | | | | | | | |
| | Cham- | | | | | | X | | | X/X | |
| | pagne | | | | | | | | | | |
| | Pearl | | | | | | | | | | |
| | Splash | | | | | | | | | | |
| | Cream | | | | | | | | X/n | X/n | |
| | Pearl | | | | | | | | | | |
| | Splash | | | | | | | | | | |
| | Dun | | | | X | X | | | | X/X | |
| | Pearl | | | | | | | | | | |
| | Splash | | | | | | | | | | |
| | Silver | | | | | | X | X | | | |
| | Cham- | | | | | | | | | | |
| | pagne | | | | | | | | | | |
| | Splash | | | | | | | | | | |
| | Silver | | | | | | X | X | | X/X | |
| | Cham- | | | | | | | | | | |
| | pagne | | | | | | | | | | |
| | Pearl | | | | | | | | | | |
| | Splash | | | | | | | | | | |
| | Silver | | | | | | | X | X/n | X/n | |
| | Cream | | | | | | | | | | |
| | Pearl | | | | | | | | | | |
| | Splash | | | | | | | | | | |
| | Silver | | | X | | | | X | | X/X | |
| | Pearl | | | | | | | | | | |
| | Splash | | | | | | | | | | |
| | Silver | | | X | X | X | | X | | X/X | |
| | Dun | | | | | | | | | | |
| | Pearl | | | | | | | | | | |
| | Splash | | | | | | | | | | |
| | Silver | | X | X | | | | X | X | | |
| | Bay | | | | | | | | | | |
| | Cream | | | | | | | | | | |
| | Splash | | | | | | | | | | |
| Tobiano | Amber | Amber | X | X | X | X | X | n/n | n/n | n/n | |
| | Dun | Cham- | | | | | | | | | |
| | Tobiano | pagne | | | | | | | | | |
| | | Dun | | | | | | | | | |
| | | Tobiano | | | | | | | | | |
| | Amber | Pseudo- | X | X | X | X | X | n/n | n/n | X/X | |
| | Dun | cream | | | | | | | | | |
| | Pearl | Amber | | | | | | | | | |
| | Tobiano | Tobiano | | | | | | | | | |
| | Bay | | X | X | n/n | n/n | n/n | n/n | n/n | n/n | |
| | Tobiano | | | | | | | | | | |
| | Black | | n/n | X | n/n | n/n | n/n | n/n | n/n | n/n | |
| | Tobiano | | | | | | | | | | |
| | Buck- | | X | X | n/n | n/n | n/n | n/n | X/n | n/n | |
| | skin | | | | | | | | | | |
| | Tobiano | | | | | | | | | | |
| | | Gold | n/n | n/n | n/n | n/n | X | n/n | n/n | n/n | |
| | | Cham- | | | | | | | | | |
| | | pagne | | | | | | | | | |
| | | Tobiano | | | | | | | | | |
| | | Classic | n/n | X | n/n | n/n | X | n/n | n/n | n/n | |
| | | Cham- | | | | | | | | | |
| | | pagne | | | | | | | | | |
| | | Tobiano | | | | | | | | | |
| | | Amber | X | X | n/n | n/n | X | n/n | n/n | n/n | |
| | | Cham- | | | | | | | | | |
| | | pagne | | | | | | | | | |
| | | Tobiano | | | | | | | | | |
| | Cham- | Classic | n/n | X | X | X | X | n/n | n/n | n/n | |
| | pagne | Cham- | | | | | | | | | |
| | Dun | pagne | | | | | | | | | |
| | Tobiano | Dun | | | | | | | | | |
| | | Tobiano | | | | | | | | | |
| | Cham- | Pseudo- | n/n | X | X | X | X | n/n | n/n | X/X | |
| | pagne | cream | | | | | | | | | |
| | Dun | Classic | | | | | | | | | |
| | Pearl | Tobiano | | | | | | | | | |
| | Tobiano | | | | | | | | | | |
| | | Cham- | n/n | n/n | n/n | n/n | X | n/n | n/n | X/X | |
| | | pagne | | | | | | | | | |
| | | Gold | | | | | | | | | |
| | | Pearl | | | | | | | | | |
| | | Tobiano | | | | | | | | | |
| | | Cham- | n/n | X | n/n | n/n | X | n/n | n/n | X/X | |
| | | pagne | | | | | | | | | |
| | | Classic | | | | | | | | | |
| | | Pearl | | | | | | | | | |
| | | Tobiano | | | | | | | | | |
| | | Cham- | X | X | n/n | n/n | X | n/n | n/n | X/X | |
| | | pagne | | | | | | | | | |
| | | Amber | | | | | | | | | |
| | | Pearl | | | | | | | | | |
| | | Tobiano | | | | | | | | | |
| | | Gold | n/n | n/n | n/n | n/n | X | n/n | X | n/n | |
| | | Cream | | | | | | | | | |
| | | Tobiano | | | | | | | | | |
| | | Classic | n/n | X | n/n | n/n | X | n/n | X | n/n | |
| | | Cream | | | | | | | | | |
| | | Tobiano | | | | | | | | | |
| | | Amber | X | X | n/n | n/n | X | n/n | X | n/n | |
| | | Cream | | | | | | | | | |
| | | Tobiano | | | | | | | | | |
| | Cream | | n/n | X | X | X | n/n | n/n | X/X | n/n | |
| | Grullo | | | | | | | | | | |
| | Tobiano | | | | | | | | | | |
| | | Chest- | n/n | n/n | n/n | n/n | n/n | n/n | X/n | X/n | |
| | | nut | | | | | | | | | |
| | | Cream | | | | | | | | | |
| | | Pearl | | | | | | | | | |
| | | Tobiano | | | | | | | | | |
| | | Black | n/n | X | n/n | n/n | n/n | n/n | X/n | X/n | |
| | | Cream | | | | | | | | | |
| | | Pearl | | | | | | | | | |
| | | Tobiano | | | | | | | | | |
| | | Bay | X | X | n/n | n/n | n/n | n/n | X/n | X/n | |
| | | Cream | | | | | | | | | |
| | | Pearl | | | | | | | | | |
| | | Tobiano | | | | | | | | | |
| | Cremello | | n/n | n/n | n/n | n/n | n/n | n/n | X/X | n/n | |
| | Tobiano | | | | | | | | | | |
| | | Red Dun | n/n | n/n | X | X | n/n | n/n | n/n | n/n | |
| | | Tobiano | | | | | | | | | |
| | | Apricot | n/n | n/n | X | X | n/n | n/n | n/n | X/X | |
| | | Dun | | | | | | | | | |
| | | Tobiano | | | | | | | | | |
| | | Gold | n/n | n/n | X | X | X | n/n | n/n | n/n | |
| | | Dun | | | | | | | | | |
| | | Tobiano | | | | | | | | | |
| | | Classic | X | X | X | X | n/n | n/n | n/n | n/n | |
| | | Dun | | | | | | | | | |
| | | Tobiano | | | | | | | | | |
| | | Dun | n/n | X | X | X | n/n | n/n | n/n | X/X | |
| | | Pearl | | | | | | | | | |
| | | Black | | | | | | | | | |
| | | Tobiano | | | | | | | | | |
| | | Dun | X | X | X | X | n/n | n/n | n/n | X/X | |
| | | Pearl | | | | | | | | | |
| | | Bay | | | | | | | | | |
| | | Tobiano | | | | | | | | | |
| | Dunolino | | n/n | n/n | X | X | n/n | n/n | X/n | n/n | |
| | Tobiano | | | | | | | | | | |
| | Dunskin | | X | X | X | X | n/n | n/n | X/n | n/n | |
| | Tobiano | | | | | | | | | | |
| | Gold Dun | Pseudo- | n/n | n/n | X | X | X | n/n | n/n | X/X | |
| | Pearl | cream | | | | | | | | | |
| | Tobiano | Gold | | | | | | | | | |
| | | Tobiano | | | | | | | | | |
| | Grullo | | n/n | X | X | X | n/n | n/n | n/n | n/n | |
| | Tobiano | | | | | | | | | | |
| | Palomino | | | n/n | n/n | n/n | n/n | n/n | X/n | n/n | |
| | Tobiano | | | | | | | | | | |
| | | Apricot | n/n | n/n | n/n | n/n | n/n | n/n | n/n | X/X | |
| | | Pearl | | | | | | | | | |
| | | Tobiano | | | | | | | | | |
| | | Black | n/n | X | n/n | n/n | n/n | n/n | n/n | X/X | |
| | | Pearl | | | | | | | | | |
| | | Tobiano | | | | | | | | | |
| | | Bay | X | X | n/n | n/n | n/n | n/n | n/n | X/X | |
| | | Pearl | | | | | | | | | |
| | | Tobiano | | | | | | | | | |
| | Perlino | | X | X | n/n | n/n | n/n | n/n | X/X | n/n | |
| | Tobiano | | | | | | | | | | |
| | Perlino | | X | X | X | X | n/n | n/n | X/X | n/n | |
| | Dun | | | | | | | | | | |
| | Tobiano | | | | | | | | | | |
| | Red | Chest- | | n/n | n/n | n/n | n/n | n/n | n/n | n/n | |
| | Tobiano | nut, | | | | | | | | | |
| | | Sorrel | | | | | | | | | |
| | Silver | Silver | X | X | X | X | X | X | n/n | n/n | |
| | Amber | Amber | | | | | | | | | |
| | Dun | Cham- | | | | | | | | | |
| | Tobiano | pagne | | | | | | | | | |
| | | Dun | | | | | | | | | |
| | | Tobiano | | | | | | | | | |
| | | Silver | n/n | X | n/n | n/n | X | X | n/n | n/n | |
| | | Classic | | | | | | | | | |
| | | Cham- | | | | | | | | | |
| | | pagne | | | | | | | | | |
| | | Tobiano | | | | | | | | | |
| | | Silver | X | X | n/n | n/n | X | X | n/n | n/n | |
| | | Amber | | | | | | | | | |
| | | Cham- | | | | | | | | | |
| | | pagne | | | | | | | | | |
| | | Tobiano | | | | | | | | | |
| | Silver | | n/n | X | X | X | X | X | n/n | n/n | |
| | Cham- | | | | | | | | | | |
| | pagne | | | | | | | | | | |
| | Dun | | | | | | | | | | |
| | Tobiano | | | | | | | | | | |
| | | Silver | n/n | X | n/n | n/n | X | X | n/n | X/X | |
| | | Classic | | | | | | | | | |
| | | Cham- | | | | | | | | | |
| | | pagne | | | | | | | | | |
| | | Pearl | | | | | | | | | |
| | | Tobiano | | | | | | | | | |
| | | Silver | X | X | n/n | n/n | X | X | n/n | X/X | |
| | | Classic | | | | | | | | | |
| | | Amber | | | | | | | | | |
| | | Pearl | | | | | | | | | |
| | | Tobiano | | | | | | | | | |
| | | Silver | n/n | X | n/n | n/n | n/n | X | X/n | X/n | |
| | | Black | | | | | | | | | |
| | | Cream | | | | | | | | | |
| | | Pearl | | | | | | | | | |
| | | Tobiano | | | | | | | | | |
| | | Silver | X | X | n/n | n/n | n/n | X | X/n | X/n | |
| | | Bay | | | | | | | | | |
| | | Cream | | | | | | | | | |
| | | Pearl | | | | | | | | | |
| | | Tobiano | | | | | | | | | |
| | Silver | Silver | n/n | X | n/n | n/n | n/n | X | n/n | n/n | |
| | Dapple | Black | | | | | | | | | |
| | Tobiano | Tobiano | | | | | | | | | |
| | Silver | | X | X | n/n | n/n | n/n | X | n/n | n/n | |
| | Bay | | | | | | | | | | |
| | Tobiano | | | | | | | | | | |
| | Silver | | X | X | n/n | n/n | n/n | X | X/n | n/n | |
| | Buck- | | | | | | | | | | |
| | skin | | | | | | | | | | |
| | Tobiano | | | | | | | | | | |
| | Silver | | n/n | X | X | X | n/n | X | X/X | n/n | |
| | Cream | | | | | | | | | | |
| | Grullo | | | | | | | | | | |
| | Tobiano | | | | | | | | | | |
| | Silver | Silver | | X | X | X | n/n | X | n/n | n/n | |
| | Dun | Dapple | | | | | | | | | |
| | Tobiano | Dun | | | | | | | | | |
| | | Tobiano | | | | | | | | | |
| | Silver | Silver | X | X | X | X | n/n | X | X/n | n/n | |
| | Dunskin | Dun Bay | | | | | | | | | |
| | Tobiano | Cream | | | | | | | | | |
| | | Tobiano | | | | | | | | | |
| | Silver | Silver | n/n | X | X | X | n/n | X | n/n | n/n | |
| | Grullo | Dun | | | | | | | | | |
| | Tobiano | Black | | | | | | | | | |
| | | Tobiano | | | | | | | | | |
| | | Silver | n/n | X | n/n | n/n | n/n | X | n/n | X/X | |
| | | Pearl | | | | | | | | | |
| | | Black | | | | | | | | | |
| | | Tobiano | | | | | | | | | |
| | | Silver | X | X | n/n | n/n | n/n | X | n/n | X/X | |
| | | Pearl | | | | | | | | | |
| | | Bay | | | | | | | | | |
| | | Tobiano | | | | | | | | | |
| | Silver | | X | X | n/n | n/n | n/n | X | X/X | n/n | |
| | Perlino | | | | | | | | | | |
| | Tobiano | | | | | | | | | | |
| | Silver | | X | X | X | X | n/n | X | X/X | n/n | |
| | Perlino | | | | | | | | | | |
| | Dun | | | | | | | | | | |
| | Tobiano | | | | | | | | | | |
| | | Silver | n/n | X | X | X | n/n | X | n/n | X/X | |
| | | Dun | | | | | | | | | |
| | | Pearl | | | | | | | | | |
| | | Black | | | | | | | | | |
| | | Tobiano | | | | | | | | | |
| | | Silver | X | X | X | X | n/n | X | n/n | X/X | |
| | | Dun | | | | | | | | | |
| | | Pearl | | | | | | | | | |
| | | Bay | | | | | | | | | |
| | | Tobiano | | | | | | | | | |
| | Silver | | n/n | X | n/n | n/n | n/n | X | X/X | n/n | |
| | Smoky | | | | | | | | | | |
| | Cream | | | | | | | | | | |
| | Tobiano | | | | | | | | | | |
| | Smoky | Black | n/n | X | n/n | n/n | n/n | n/n | X/n | n/n | |
| | Black | Cream | | | | | | | | | |
| | Tobiano | Tobiano | | | | | | | | | |
| | Smoky | | n/n | X | n/n | n/n | n/n | n/n | X/X | n/n | |
| | Cream | | | | | | | | | | |
| | Tobiano | | | | | | | | | | |
| | Smoky | Dun | n/n | X | X | X | n/n | n/n | X/n | n/n | |
| | Grullo | Black | | | | | | | | | |
| | Tobiano | Cream | | | | | | | | | |
| | | Tobiano | | | | | | | | | |
| | Cham- | | | | | | X | | | X/X | |
| | pagne | | | | | | | | | | |
| | Pearl | | | | | | | | | | |
| | Tobiano | | | | | | | | | | |
| | Cream | | | | | | | | X/n | X/n | |
| | Pearl | | | | | | | | | | |
| | Tobiano | | | | | | | | | | |
| | Dun | | | | X | X | | | | X/X | |
| | Pearl | | | | | | | | | | |
| | Tobiano | | | | | | | | | | |
| | Silver | | | | | | X | X | | | |
| | Cham- | | | | | | | | | | |
| | pagne | | | | | | | | | | |
| | Tobiano | | | | | | | | | | |
| | Silver | | | | | | X | X | | X/X | |
| | Cham- | | | | | | | | | | |
| | pagne | | | | | | | | | | |
| | Pearl | | | | | | | | | | |
| | Tobiano | | | | | | | | | | |
| | Silver | | | | | | | X | X/n | X/n | |
| | Cream | | | | | | | | | | |
| | Pearl | | | | | | | | | | |
| | Tobiano | | | | | | | | | | |
| | Silver | | | X | | | | X | | X/X | |
| | Pearl | | | | | | | | | | |
| | Tobiano | | | | | | | | | | |
| | Silver | | | X | X | X | | X | | X/X | |
| | Dun | | | | | | | | | | |
| | Pearl | | | | | | | | | | |
| | Tobiano | | | | | | | | | | |
| | Silver | | X | X | | | | X | X | | |
| | Bay | | | | | | | | | | |
| | Cream | | | | | | | | | | |
| | Tobiano | | | | | | | | | | |
| Sabino | Amber | Amber | X | X | X | X | X | n/n | n/n | n/n | |
| | Dun | Cham- | | | | | | | | | |
| | Sabino | pagne | | | | | | | | | |
| | | Dun | | | | | | | | | |
| | | Sabino | | | | | | | | | |
| | Amber | Pseudo- | X | X | X | X | X | n/n | n/n | X/X | |
| | Dun | cream | | | | | | | | | |
| | Pearl | Amber | | | | | | | | | |
| | Sabino | Sabino | | | | | | | | | |
| | Bay | | X | X | n/n | n/n | n/n | n/n | n/n | n/n | |
| | Sabino | | | | | | | | | | |
| | Black | | n/n | X | n/n | n/n | n/n | n/n | n/n | n/n | |
| | Sabino | | | | | | | | | | |
| | Buck- | | X | X | n/n | n/n | n/n | n/n | X/n | n/n | |
| | skin | | | | | | | | | | |
| | Sabino | | | | | | | | | | |
| | | Gold | n/n | n/n | n/n | n/n | X | n/n | n/n | n/n | |
| | | Cham- | | | | | | | | | |
| | | pagne | | | | | | | | | |
| | | Sabino | | | | | | | | | |
| | | Classic | n/n | X | n/n | n/n | X | n/n | n/n | n/n | |
| | | Cham- | | | | | | | | | |
| | | pagne | | | | | | | | | |
| | | Sabino | | | | | | | | | |
| | | Amber | X | X | n/n | n/n | X | n/n | n/n | n/n | |
| | | Cham- | | | | | | | | | |
| | | pagne | | | | | | | | | |
| | | Sabino | | | | | | | | | |
| | Cham- | Classic | n/n | X | X | X | X | n/n | n/n | n/n | |
| | pagne | Cham- | | | | | | | | | |
| | Dun | pagne | | | | | | | | | |
| | Sabino | Dun | | | | | | | | | |
| | | Sabino | | | | | | | | | |
| | Cham- | Pseudo- | n/n | X | X | X | X | n/n | n/n | X/X | |
| | pagne | cream | | | | | | | | | |
| | Dun | Classic | | | | | | | | | |
| | Pearl | Sabino | | | | | | | | | |
| | Sabino | | | | | | | | | | |
| | | Cham- | n/n | n/n | n/n | n/n | X | n/n | n/n | X/X | |
| | | pagne | | | | | | | | | |
| | | Gold | | | | | | | | | |
| | | Pearl | | | | | | | | | |
| | | Sabino | | | | | | | | | |
| | | Cham- | n/n | X | n/n | n/n | X | n/n | n/n | X/X | |
| | | pagne | | | | | | | | | |
| | | Classic | | | | | | | | | |
| | | Pearl | | | | | | | | | |
| | | Sabino | | | | | | | | | |
| | | Cham- | X | X | n/n | n/n | X | n/n | n/n | X/X | |
| | | pagne | | | | | | | | | |
| | | Amber | | | | | | | | | |
| | | Pearl | | | | | | | | | |
| | | Sabino | | | | | | | | | |
| | | Gold | n/n | n/n | n/n | n/n | X | n/n | X | n/n | |
| | | Cream | | | | | | | | | |
| | | Sabino | | | | | | | | | |
| | | Classic | n/n | X | n/n | n/n | X | n/n | X | n/n | |
| | | Cream | | | | | | | | | |
| | | Sabino | | | | | | | | | |
| | | Amber | X | X | n/n | n/n | X | n/n | X | n/n | |
| | | Cream | | | | | | | | | |
| | | Sabino | | | | | | | | | |
| | Cream | | n/n | X | X | X | n/n | n/n | X/X | n/n | |
| | Grullo | | | | | | | | | | |
| | Sabino | | | | | | | | | | |
| | | Chest- | n/n | n/n | n/n | n/n | n/n | n/n | X/n | X/n | |
| | | nut | | | | | | | | | |
| | | Cream | | | | | | | | | |
| | | Pearl | | | | | | | | | |
| | | Sabino | | | | | | | | | |
| | | Black | n/n | X | n/n | n/n | n/n | n/n | X/n | X/n | |
| | | Cream | | | | | | | | | |
| | | Pearl | | | | | | | | | |
| | | Sabino | | | | | | | | | |
| | | Bay | X | X | n/n | n/n | n/n | n/n | X/n | X/n | |
| | | Cream | | | | | | | | | |
| | | Pearl | | | | | | | | | |
| | | Sabino | | | | | | | | | |
| | Cremello | | n/n | n/n | n/n | n/n | n/n | n/n | X/X | n/n | |
| | Sabino | | | | | | | | | | |
| | | Red Dun | n/n | n/n | X | X | n/n | n/n | n/n | n/n | |
| | | Sabino | | | | | | | | | |
| | | Apricot | n/n | n/n | X | X | n/n | n/n | n/n | X/X | |
| | | Dun | | | | | | | | | |
| | | Sabino | | | | | | | | | |
| | | Gold | n/n | n/n | X | X | X | n/n | n/n | n/n | |
| | | Dun | | | | | | | | | |
| | | Sabino | | | | | | | | | |
| | | Classic | X | X | X | X | n/n | n/n | n/n | n/n | |
| | | Dun | | | | | | | | | |
| | | Sabino | | | | | | | | | |
| | | Dun | n/n | X | X | X | n/n | n/n | n/n | X/X | |
| | | Pearl | | | | | | | | | |
| | | Black | | | | | | | | | |
| | | Sabino | | | | | | | | | |
| | | Dun | X | X | X | X | n/n | n/n | n/n | X/X | |
| | | Pearl | | | | | | | | | |
| | | Bay | | | | | | | | | |
| | | Sabino | | | | | | | | | |
| | Dunolino | | n/n | n/n | X | X | n/n | n/n | X/n | n/n | |
| | Sabino | | | | | | | | | | |
| | Dunskin | | X | X | X | X | n/n | n/n | X/n | n/n | |
| | Sabino | | | | | | | | | | |
| | Gold Dun | Pseudo- | n/n | n/n | X | X | X | n/n | n/n | X/X | |
| | Pearl | cream | | | | | | | | | |
| | Sabino | Gold | | | | | | | | | |
| | | Sabino | | | | | | | | | |
| | Grullo | | n/n | X | X | X | n/n | n/n | n/n | n/n | |
| | Sabino | | | | | | | | | | |
| | Palomino | | | n/n | n/n | n/n | n/n | n/n | X/n | n/n | |
| | Sabino | | | | | | | | | | |
| | | Apricot | n/n | n/n | n/n | n/n | n/n | n/n | n/n | X/X | |
| | | Pearl | | | | | | | | | |
| | | Sabino | | | | | | | | | |
| | | Black | n/n | X | n/n | n/n | n/n | n/n | n/n | X/X | |
| | | Pearl | | | | | | | | | |
| | | Sabino | | | | | | | | | |
| | | Bay | X | X | n/n | n/n | n/n | n/n | n/n | X/X | |
| | | Pearl | | | | | | | | | |
| | | Sabino | | | | | | | | | |
| | Perlino | | X | X | n/n | n/n | n/n | n/n | X/X | n/n | |
| | Sabino | | | | | | | | | | |
| | Perlino | | X | X | X | X | n/n | n/n | X/X | n/n | |
| | Dun | | | | | | | | | | |
| | Sabino | | | | | | | | | | |
| | Red | Chest- | | n/n | n/n | n/n | n/n | n/n | n/n | n/n | |
| | Sabino | nut | | | | | | | | | |
| | | Sorrel | | | | | | | | | |
| | | Sabino | | | | | | | | | |
| | Silver | Silver | X | X | X | X | X | X | n/n | n/n | |
| | Amber | Amber | | | | | | | | | |
| | Dun | Cham- | | | | | | | | | |
| | Sabino | pagne | | | | | | | | | |
| | | Dun | | | | | | | | | |
| | | Sabino | | | | | | | | | |
| | | Silver | n/n | X | n/n | n/n | X | X | n/n | n/n | |
| | | Classic | | | | | | | | | |
| | | Cham- | | | | | | | | | |
| | | pagne | | | | | | | | | |
| | | Sabino | | | | | | | | | |
| | | Silver | X | X | n/n | n/n | X | X | n/n | n/n | |
| | | Amber | | | | | | | | | |
| | | Cham- | | | | | | | | | |
| | | pagne | | | | | | | | | |
| | | Sabino | | | | | | | | | |
| | Silver | | n/n | X | X | X | X | X | n/n | n/n | |
| | Cham- | | | | | | | | | | |
| | pagne | | | | | | | | | | |
| | Dun | | | | | | | | | | |
| | Sabino | | | | | | | | | | |
| | | Silver | n/n | X | n/n | n/n | X | X | n/n | X/X | |
| | | Classic | | | | | | | | | |
| | | Cham- | | | | | | | | | |
| | | pagne | | | | | | | | | |
| | | Pearl | | | | | | | | | |
| | | Sabino | | | | | | | | | |
| | | Silver | X | X | n/n | n/n | X | X | n/n | X/X | |
| | | Classic | | | | | | | | | |
| | | Amber | | | | | | | | | |
| | | Pearl | | | | | | | | | |
| | | Sabino | | | | | | | | | |
| | | Silver | n/n | X | n/n | n/n | n/n | X | X/n | X/n | |
| | | Black | | | | | | | | | |
| | | Cream | | | | | | | | | |
| | | Pearl | | | | | | | | | |
| | | Sabino | | | | | | | | | |
| | | Silver | X | X | n/n | n/n | n/n | X | X/n | X/n | |
| | | Bay | | | | | | | | | |
| | | Cream | | | | | | | | | |
| | | Pearl | | | | | | | | | |
| | | Sabino | | | | | | | | | |
| | Silver | Silver | n/n | X | n/n | n/n | n/n | X | n/n | n/n | |
| | Dapple | Black | | | | | | | | | |
| | Sabino | Sabino | | | | | | | | | |
| | Silver | | X | X | n/n | n/n | n/n | X | n/n | n/n | |
| | Bay | | | | | | | | | | |
| | Sabino | | | | | | | | | | |
| | Silver | | X | X | n/n | n/n | n/n | X | X/n | n/n | |
| | Buck- | | | | | | | | | | |
| | skin | | | | | | | | | | |
| | Sabino | | | | | | | | | | |
| | Silver | | n/n | X | X | X | n/n | X | X/X | n/n | |
| | Cream | | | | | | | | | | |
| | Grullo | | | | | | | | | | |
| | Sabino | | | | | | | | | | |
| | Silver | Silver | | X | X | X | n/n | X | n/n | n/n | |
| | Dun | Dapple | | | | | | | | | |
| | Sabino | Dun | | | | | | | | | |
| | | Sabino | | | | | | | | | |
| | Silver | Silver | X | X | X | X | n/n | X | X/n | n/n | |
| | Dunskin | Dun Bay | | | | | | | | | |
| | Sabino | Cream | | | | | | | | | |
| | | Sabino | | | | | | | | | |
| | Silver | Silver | n/n | X | X | X | n/n | X | n/n | n/n | |
| | Grullo | Dun | | | | | | | | | |
| | Sabino | Black | | | | | | | | | |
| | | Sabino | | | | | | | | | |
| | | Silver | n/n | X | n/n | n/n | n/n | X | n/n | X/X | |
| | | Pearl | | | | | | | | | |
| | | Black | | | | | | | | | |
| | | Sabino | | | | | | | | | |
| | | Silver | X | X | n/n | n/n | n/n | X | n/n | X/X | |
| | | Pearl | | | | | | | | | |
| | | Bay | | | | | | | | | |
| | | Sabino | | | | | | | | | |
| | Silver | | X | X | n/n | n/n | n/n | X | X/X | n/n | |
| | Perlino | | | | | | | | | | |
| | Sabino | | | | | | | | | | |
| | Silver | | X | X | X | X | n/n | X | X/X | n/n | |
| | Perlino | | | | | | | | | | |
| | Dun | | | | | | | | | | |
| | Sabino | | | | | | | | | | |
| | | Silver | n/n | X | X | X | n/n | X | n/n | X/X | |
| | | Dun | | | | | | | | | |
| | | Pearl | | | | | | | | | |
| | | Black | | | | | | | | | |
| | | Sabino | | | | | | | | | |
| | | Silver | X | X | X | X | n/n | X | n/n | X/X | |
| | | Dun | | | | | | | | | |
| | | Pearl | | | | | | | | | |
| | | Bay | | | | | | | | | |
| | | Sabino | | | | | | | | | |
| | Silver | | n/n | X | n/n | n/n | n/n | X | X/X | n/n | |
| | Smoky | | | | | | | | | | |
| | Cream | | | | | | | | | | |
| | Sabino | | | | | | | | | | |
| | Smoky | Black | n/n | X | n/n | n/n | n/n | n/n | X/n | n/n | |
| | Black | Cream | | | | | | | | | |
| | Sabino | Sabino | | | | | | | | | |
| | Smoky | | n/n | X | n/n | n/n | n/n | n/n | X/X | n/n | |
| | Cream | | | | | | | | | | |
| | Sabino | | | | | | | | | | |
| | Smoky | Dun | n/n | X | X | X | n/n | n/n | X/n | n/n | |
| | Grullo | Black | | | | | | | | | |
| | Sabino | Cream | | | | | | | | | |
| | | Sabino | | | | | | | | | |
| | Cham- | | | | | | X | | | X/X | |
| | pagne | | | | | | | | | | |
| | Pearl | | | | | | | | | | |
| | Sabino | | | | | | | | | | |
| | Cream | | | | | | | | X/n | X/n | |
| | Pearl | | | | | | | | | | |
| | Sabino | | | | | | | | | | |
| | Dun | | | | X | X | | | | X/X | |
| | Pearl | | | | | | | | | | |
| | Sabino | | | | | | | | | | |
| | Silver | | | | | | X | X | | | |
| | Cham- | | | | | | | | | | |
| | pagne | | | | | | | | | | |
| | Sabino | | | | | | | | | | |
| | Silver | | | | | | X | X | | X/X | |
| | Cham- | | | | | | | | | | |
| | pagne | | | | | | | | | | |
| | Pearl | | | | | | | | | | |
| | Sabino | | | | | | | | | | |
| | Silver | | | | | | | X | X/n | X/n | |
| | Cream | | | | | | | | | | |
| | Pearl | | | | | | | | | | |
| | Sabino | | | | | | | | | | |
| | Silver | | | X | | | | X | | X/X | |
| | Pearl | | | | | | | | | | |
| | Sabino | | | | | | | | | | |
| | Silver | | | X | X | X | | X | | X/X | |
| | Dun | | | | | | | | | | |
| | Pearl | | | | | | | | | | |
| | Sabino | | | | | | | | | | |
| | Silver | | X | X | | | | X | X | | |
| | Bay | | | | | | | | | | |
| | Cream | | | | | | | | | | |
| | Tobiano | | | | | | | | | | |

| | Coat | | | | | | | | | | |
|---|---|---|---|---|---|---|---|---|---|---|---|
| | color + | | | | | | | | | | |
| Modifi- | modifi- | Also | | Tobiano- | | | | | | | |
| cation | cation | known as | KIT1SB12 | E2 | MITFSW1 | MITFSW3 | MITFSW5 | PAX3SW2 | PAX3P32R | KITW5 | KITW20 |
| Overo | Amber | Amber | | | | | | | | | X/n |
| | Dun | Cham- | | | | | | | | | |
| | Overo | pagne | | | | | | | | | |
| | | Dun | | | | | | | | | |
| | | Overo | | | | | | | | | |
| | Amber | Pseudo- | | | | | | | | | X/X |
| | Dun | cream | | | | | | | | | |
| | Pearl | Amber | | | | | | | | | |
| | Overo | Overo | | | | | | | | | |
| | Bay | | | | | | | | | | X/n |
| | Overo | | | | | | | | | | |
| | Black | | | | | | | | | | |
| | Overo | | | | | | | | | | |
| | Buck- | | | | | | | | | | |
| | skin | | | | | | | | | | |
| | Overo | | | | | | | | | | |
| | | Gold | | | | | | | | | |
| | | Cham- | | | | | | | | | |
| | | pagne | | | | | | | | | |
| | | Overo | | | | | | | | | |
| | | Classic | | | | | | | | | |
| | | Cham- | | | | | | | | | |
| | | pagne | | | | | | | | | |
| | | Overo | | | | | | | | | |
| | | Amber | | | | | | | | | |
| | | Cham- | | | | | | | | | |
| | | pagne | | | | | | | | | |
| | | Overo | | | | | | | | | |
| | Cham- | Classic | | | X | | | | | | |
| | pagne | Cham- | | | | | | | | | |
| | Dun | pagne | | | | | | | | | |
| | Overo | Dun | | | | | | | | | |
| | | Overo | | | | | | | | | |
| | Cham- | Pseudo- | | | | | | X/n | | | |
| | pagne | cream | | | | | | | | | |
| | Dun | Classic | | | | | | | | | |
| | Pearl | Overo | | | | | | | | | |
| | Overo | | | | | | | | | | |
| | | Cham- | | | | X/n | | | | | |
| | | pagne | | | | | | | | | |
| | | Gold | | | | | | | | | |
| | | Pearl | | | | | | | | | |
| | | Overo | | | | | | | | | |
| | | Cham- | | | | | | | X | | |
| | | pagne | | | | | | | | | |
| | | Classic | | | | | | | | | |
| | | Pearl | | | | | | | | | |
| | | Overo | | | | | | | | | |
| | | Cham- | | | | | X/n | | | | |
| | | pagne | | | | | | | | | |
| | | Amber | | | | | | | | | |
| | | Pearl | | | | | | | | | |
| | | Overo | | | | | | | | | |
| | | Gold | | | | | | | | | |
| | | Cream | | | | | | | | | |
| | | Overo | | | | | | | | | |
| | | Classic | | | | | | | | | |
| | | Cream | | | | | | | | | |
| | | Overo | | | | | | | | | |
| | | Amber | | | | | | | | | |
| | | Cream | | | | | | | | | |
| | | Overo | | | | | | | | | |
| | Cream | | | | | | | | | | |
| | Grullo | | | | | | | | | | |
| | Overo | | | | | | | | | | |
| | | Chest- | | | | | | | | | |
| | | nut | | | | | | | | | |
| | | Cream | | | | | | | | | |
| | | Pearl | | | | | | | | | |
| | | Overo | | | | | | | | | |
| | | Black | | | | | | | | | |
| | | Cream | | | | | | | | | |
| | | Pearl | | | | | | | | | |
| | | Overo | | | | | | | | | |
| | | Bay | | | | | | | | | |
| | | Cream | | | | | | | | | |
| | | Pearl | | | | | | | | | |
| | | Overo | | | | | | | | | |
| | Cremello | | | | | | | | | | |
| | Overo | | | | | | | | | | |
| | | Red Dun | | | | | | | | | |
| | | Overo | | | | | | | | | |
| | | Apricot | | | | | | | | | |
| | | Dun | | | | | | | | | |
| | | Overo | | | | | | | | | |
| | | Gold | | | | | | | | | |
| | | Dun | | | | | | | | | |
| | | Overo | | | | | | | | | |
| | | Classic | | | | | | | | | |
| | | Dun | | | | | | | | | |
| | | Overo | | | | | | | | | |
| | | Dun | | | | | | | | | |
| | | Pearl | | | | | | | | | |
| | | Black | | | | | | | | | |
| | | Overo | | | | | | | | | |
| | | Dun | | | | | | | | | |
| | | Pearl | | | | | | | | | |
| | | Bay | | | | | | | | | |
| | | Overo | | | | | | | | | |
| | Dunolino | | | | | | | | | | |
| | Overo | | | | | | | | | | |
| | Dunskin | | | | | | | | | | |
| | Overo | | | | | | | | | | |
| | Gold Dun | Pseudo- | | | | | | | | | |
| | Pearl | cream | | | | | | | | | |
| | Overo | Gold | | | | | | | | | |
| | | Overo | | | | | | | | | |
| | Grullo | | | | | | | | | | |
| | Overo | | | | | | | | | | |
| | Palomino | | | | | | | | | | |
| | Overo | | | | | | | | | | |
| | | Apricot | | | | | | | | | |
| | | Pearl | | | | | | | | | |
| | | Overo | | | | | | | | | |
| | | Black | | | | | | | | | |
| | | Pearl | | | | | | | | | |
| | | Overo | | | | | | | | | |
| | | Bay | | | | | | | | | |
| | | Pearl | | | | | | | | | |
| | | Over | | | | | | | | | |
| | Perlino | | | | | | | | | | |
| | Overo | | | | | | | | | | |
| | Perlino | | | | | | | | | | |
| | Dun | | | | | | | | | | |
| | Overo | | | | | | | | | | |
| | Red | Chest- | | | | | | | | | |
| | Overo | nut, | | | | | | | | | |
| | | Sorrel | | | | | | | | | |
| | | Overo | | | | | | | | | |
| | Silver | Silver | | | | | | | | | |
| | Amber | Amber | | | | | | | | | |
| | Dun | Cham- | | | | | | | | | |
| | Overo | pagne | | | | | | | | | |
| | | Dun | | | | | | | | | |
| | | Overo | | | | | | | | | |
| | | Silver | | | | | | | | | |
| | | Classic | | | | | | | | | |
| | | Cham- | | | | | | | | | |
| | | pagne | | | | | | | | | |
| | | Overo | | | | | | | | | |
| | | Silver | | | | | | | | | |
| | | Amber | | | | | | | | | |
| | | Cham- | | | | | | | | | |
| | | pagne | | | | | | | | | |
| | | Overo | | | | | | | | | |
| | Silver | | | | | | | | | | |
| | Cham- | | | | | | | | | | |
| | pagne | | | | | | | | | | |
| | Dun | | | | | | | | | | |
| | Overo | | | | | | | | | | |
| | | Silver | | | | | | | | | |
| | | Classic | | | | | | | | | |
| | | Cham- | | | | | | | | | |
| | | pagne | | | | | | | | | |
| | | Pearl | | | | | | | | | |
| | | Overo | | | | | | | | | |
| | | Silver | | | | | | | | | |
| | | Classic | | | | | | | | | |
| | | Amber | | | | | | | | | |
| | | Pearl | | | | | | | | | |
| | | Overo | | | | | | | | | |
| | | Silver | | | | | | | | | |
| | | Black | | | | | | | | | |
| | | Cream | | | | | | | | | |
| | | Pearl | | | | | | | | | |
| | | Overo | | | | | | | | | |
| | | Silver | | | | | | | | | |
| | | Bay | | | | | | | | | |
| | | Cream | | | | | | | | | |
| | | Pearl | | | | | | | | | |
| | | Overo | | | | | | | | | |
| | Silver | Silver | | | | | | | | | |
| | Dapple | Black | | | | | | | | | |
| | Overo | Overo | | | | | | | | | |
| | Silver | | | | | | | | | | |
| | Bay | | | | | | | | | | |
| | Overo | | | | | | | | | | |
| | Silver | | | | | | | | | | |
| | Buck- | | | | | | | | | | |
| | skin | | | | | | | | | | |
| | Overo | | | | | | | | | | |
| | Silver | | | | | | | | | | |
| | Cream | | | | | | | | | | |
| | Grullo | | | | | | | | | | |
| | Overo | | | | | | | | | | |
| | Silver | Silver | | | | | | | | | |
| | Dun | Dapple | | | | | | | | | |
| | Overo | Dun | | | | | | | | | |
| | | Overo | | | | | | | | | |
| | Silver | Silver | | | | | | | | | |
| | Dunskin | Dun Bay | | | | | | | | | |
| | Overo | Cream | | | | | | | | | |
| | | Overo | | | | | | | | | |
| | Silver | Silver | | | | | | | | | |
| | Grullo | Dun | | | | | | | | | |
| | Overo | Black | | | | | | | | | |
| | | Overo | | | | | | | | | |
| | | Silver | | | | | | | | | |
| | | Pearl | | | | | | | | | |
| | | Black | | | | | | | | | |
| | | Overo | | | | | | | | | |
| | | Silver | | | | | | | | | |
| | | Pearl | | | | | | | | | |
| | | Bay | | | | | | | | | |
| | | Overo | | | | | | | | | |
| | Silver | | | | | | | | | | |
| | Perlino | | | | | | | | | | |
| | Overo | | | | | | | | | | |
| | Silver | | | | | | | | | | |
| | Perlino | | | | | | | | | | |
| | Dun | | | | | | | | | | |
| | Overo | | | | | | | | | | |
| | | Silver | | | | | | | | | |
| | | Dun | | | | | | | | | |
| | | Pearl | | | | | | | | | |
| | | Black | | | | | | | | | |
| | | Overo | | | | | | | | | |
| | | Silver | | | | | | | | | |
| | | Dun | | | | | | | | | |
| | | Pearl | | | | | | | | | |
| | | Bay | | | | | | | | | |
| | | Overo | | | | | | | | | |
| | Silver | | | | | | | | | | |
| | Smoky | | | | | | | | | | |
| | Cream | | | | | | | | | | |
| | Overo | | | | | | | | | | |
| | Smoky | Black | | | | | | | | | |
| | Black | Cream | | | | | | | | | |
| | Overo | Overo | | | | | | | | | |
| | Smoky | | | | | | | | | | |
| | Cream | | | | | | | | | | |
| | Overo | | | | | | | | | | |
| | Smoky | Dun | | | | | | | | | |
| | Grullo | Black | | | | | | | | | |
| | Overo | Cream | | | | | | | | | |
| | | Overo | | | | | | | | | |
| | Cham- | | | | | | | | | | |
| | pagne | | | | | | | | | | |
| | Pearl | | | | | | | | | | |
| | Overo | | | | | | | | | | |
| | Cream | | | | | | | | | | |
| | Pearl | | | | | | | | | | |
| | Overo | | | | | | | | | | |
| | Dun | | | | | | | | | | |
| | Pearl | | | | | | | | | | |
| | Overo | | | | | | | | | | |
| | Silver | | | | | | | | | | |
| | Cham- | | | | | | | | | | |
| | pagne | | | | | | | | | | |
| | Overo | | | | | | | | | | |
| | Silver | | | | | | | | | | |
| | Cham- | | | | | | | | | | |
| | pagne | | | | | | | | | | |
| | Pearl | | | | | | | | | | |
| | Overo | | | | | | | | | | |
| | Silver | | | | | | | | | | |
| | Cream | | | | | | | | | | |
| | Pearl | | | | | | | | | | |
| | Overo | | | | | | | | | | |
| | Silver | | | | | | | | | | |
| | Pearl | | | | | | | | | | |
| | Overo | | | | | | | | | | |
| | Silver | | | | | | | | | | |
| | Dun | | | | | | | | | | |
| | Pearl | | | | | | | | | | |
| | Overo | | | | | | | | | | |
| | Silver | Silver | | | | | | | | | |
| | Bay | Buck- | | | | | | | | | |
| | Cream | skin | | | | | | | | | |
| | Overo | Overo | | | | | | | | | |
| Tovero | Amber | Amber | | X | | | | | | | X/n |
| | Dun | Cham- | | | | | | | | | |
| | Tovero | pagne | | | | | | | | | |
| | | Dun | | | | | | | | | |
| | | Tovero | | | | | | | | | |
| | Amber | Pseudo- | | X | | | | | | | X/X |
| | Dun | cream | | | | | | | | | |
| | Pearl | Amber | | | | | | | | | |
| | Tovero | Tovero | | | | | | | | | |
| | Bay | | | X | | | | | | X/n | X/n |
| | Tovero | | | | | | | | | | |
| | Black | | | X | | | | | | | |
| | Tovero | | | | | | | | | | |
| | Buck- | | | X | | | | | | | |
| | skin | | | | | | | | | | |
| | Tovero | | | | | | | | | | |
| | | Gold | | X | | | | | | | |
| | | Cham- | | | | | | | | | |
| | | pagne | | | | | | | | | |
| | | Tovero | | | | | | | | | |
| | | Classic | | X | | | | | | | |
| | | Cham- | | | | | | | | | |
| | | pagne | | | | | | | | | |
| | | Tovero | | | | | | | | | |
| | | Amber | | X | | | | | | | |
| | | Cham- | | | | | | | | | |
| | | pagne | | | | | | | | | |
| | | Tovero | | | | | | | | | |
| | Cham- | Classic | | X | X | | | | | | |
| | pagne | Cham- | | | | | | | | | |
| | Dun | pagne | | | | | | | | | |
| | Tovero | Dun | | | | | | | | | |
| | | Tovero | | | | | | | | | |
| | Cham- | Pseudo- | | X | | | | X/n | | | |
| | pagne | cream | | | | | | | | | |
| | Dun | Classic | | | | | | | | | |
| | Pearl | Tovero | | | | | | | | | |
| | Tovero | | | | | | | | | | |
| | | Cham- | | X | | X/n | | | | | |
| | | pagne | | | | | | | | | |
| | | Gold | | | | | | | | | |
| | | Pearl | | | | | | | | | |
| | | Tovero | | | | | | | | | |
| | | Cham- | | X | | | | | X | | |
| | | pagne | | | | | | | | | |
| | | Classic | | | | | | | | | |
| | | Pearl | | | | | | | | | |
| | | Tovero | | | | | | | | | |
| | | Cham- | | X | | | X/n | | | | |
| | | pagne | | | | | | | | | |
| | | Amber | | | | | | | | | |
| | | Pearl | | | | | | | | | |
| | | Tovero | | | | | | | | | |
| | | Gold | | X | | | | | | | |
| | | Cream | | | | | | | | | |
| | | Tovero | | | | | | | | | |
| | | Classic | | X | | | | | | | |
| | | Cream | | | | | | | | | |
| | | Tovero | | | | | | | | | |
| | | Amber | | X | | | | | | | |
| | | Cream | | | | | | | | | |
| | | Tovero | | | | | | | | | |
| | Cream | | | X | | | | | | | |
| | Grullo | | | | | | | | | | |
| | Tovero | | | | | | | | | | |
| | | Chest- | | X | | | | | | | |
| | | nut | | | | | | | | | |
| | | Cream | | | | | | | | | |
| | | Pearl | | | | | | | | | |
| | | Tovero | | | | | | | | | |
| | | Black | | X | | | | | | | |
| | | Cream | | | | | | | | | |
| | | Pearl | | | | | | | | | |
| | | Tovero | | | | | | | | | |
| | | Bay | | X | | | | | | | |
| | | Cream | | | | | | | | | |
| | | Pearl | | | | | | | | | |
| | | Tovero | | | | | | | | | |
| | Cremello | | | X | | | | | | | |
| | Tovero | | | | | | | | | | |
| | | Red Dun | | X | | | | | | | |
| | | Tovero | | | | | | | | | |
| | | Apricot | | X | | | | | | | |
| | | Dun | | | | | | | | | |
| | | Tovero | | | | | | | | | |
| | | Gold | | X | | | | | | | |
| | | Dun | | | | | | | | | |
| | | Tovero | | | | | | | | | |
| | | Classic | | X | | | | | | | |
| | | Dun | | | | | | | | | |
| | | Tovero | | | | | | | | | |
| | | Dun | | X | | | | | | | |
| | | Pearl | | | | | | | | | |
| | | Black | | | | | | | | | |
| | | Tovero | | | | | | | | | |
| | | Dun | | X | | | | | | | |
| | | Pearl | | | | | | | | | |
| | | Bay | | | | | | | | | |
| | | Tovero | | | | | | | | | |
| | Dunolino | | | X | | | | | | | |
| | Tovero | | | | | | | | | | |
| | Dunskin | | | X | | | | | | | |
| | Tovero | | | | | | | | | | |
| | Gold | Pseudo- | | X | | | | | | | |
| | Dun | cream | | | | | | | | | |
| | Pearl | Gold | | | | | | | | | |
| | Tovero | Tovero | | | | | | | | | |
| | Grullo | | | X | | | | | | | |
| | Tovero | | | | | | | | | | |
| | Palomino | | | X | | | | | | | |
| | Tovero | | | | | | | | | | |
| | | Apricot | | X | | | | | | | |
| | | Pearl | | | | | | | | | |
| | | Tovero | | | | | | | | | |
| | | Black | | X | | | | | | | |
| | | Pearl | | | | | | | | | |
| | | Tovero | | | | | | | | | |
| | | Bay | | X | | | | | | | |
| | | Pearl | | | | | | | | | |
| | | Tovero | | | | | | | | | |
| | Perlino | | | X | | | | | | | |
| | Tovero | | | | | | | | | | |
| | Perlino | | | X | | | | | | | |
| | Dun | | | | | | | | | | |
| | Tovero | | | | | | | | | | |
| | Red | Chest- | | X | | | | | | | |
| | Tovero | nut, | | | | | | | | | |
| | | Sorrel | | | | | | | | | |
| | | Tovero | | | | | | | | | |
| | Silver | Silver | | X | | | | | | | |
| | Amber | Amber | | | | | | | | | |
| | Dun | Cham- | | | | | | | | | |
| | Tovero | pagne | | | | | | | | | |
| | | Dun | | | | | | | | | |
| | | Tovero | | | | | | | | | |
| | | Silver | | X | | | | | | | |
| | | Classic | | | | | | | | | |
| | | Cham- | | | | | | | | | |
| | | pagne | | | | | | | | | |
| | | Tovero | | | | | | | | | |
| | | Silver | | X | | | | | | | |
| | | Amber | | | | | | | | | |
| | | Cham- | | | | | | | | | |
| | | pagne | | | | | | | | | |
| | | Tovero | | | | | | | | | |
| | Silver | | | X | | | | | | | |
| | Cham- | | | | | | | | | | |
| | pagne | | | | | | | | | | |
| | Dun | | | | | | | | | | |
| | Tovero | | | | | | | | | | |
| | | Silver | | X | | | | | | | |
| | | Classic | | | | | | | | | |
| | | Cham- | | | | | | | | | |
| | | pagne | | | | | | | | | |
| | | Pearl | | | | | | | | | |
| | | Tovero | | | | | | | | | |
| | | Silver | | X | | | | | | | |
| | | Classic | | | | | | | | | |
| | | Amber | | | | | | | | | |
| | | Pearl | | | | | | | | | |
| | | Tovero | | | | | | | | | |
| | | Silver | | X | | | | | | | |
| | | Black | | | | | | | | | |
| | | Cream | | | | | | | | | |
| | | Pearl | | | | | | | | | |
| | | Tovero | | | | | | | | | |
| | | Silver | | X | | | | | | | |
| | | Bay | | | | | | | | | |
| | | Cream | | | | | | | | | |
| | | Pearl | | | | | | | | | |
| | | Tovero | | | | | | | | | |
| | Silver | Silver | | X | | | | | | | |
| | Dapple | Black | | | | | | | | | |
| | Tovero | Tovero | | | | | | | | | |
| | Silver | | | X | | | | | | | |
| | Bay | | | | | | | | | | |
| | Tovero | | | | | | | | | | |
| | Silver | | | X | | | | | | | |
| | Buck- | | | | | | | | | | |
| | skin | | | | | | | | | | |
| | Tovero | | | | | | | | | | |
| | Silver | | | X | | | | | | | |
| | Cream | | | | | | | | | | |
| | Grullo | | | | | | | | | | |
| | Tovero | | | | | | | | | | |
| | Silver | Silver | | X | | | | | | | |
| | Dun | Dapple | | | | | | | | | |
| | Tovero | Dun | | | | | | | | | |
| | | Tovero | | | | | | | | | |
| | Silver | Silver | | X | | | | | | | |
| | Dunskin | Dun Bay | | | | | | | | | |
| | Tovero | Cream | | | | | | | | | |
| | | Tovero | | | | | | | | | |
| | Silver | Silver | | X | | | | | | | |
| | Grullo | Dun | | | | | | | | | |
| | Tovero | Black | | | | | | | | | |
| | | Tovero | | | | | | | | | |
| | | Silver | | X | | | | | | | |
| | | Pearl | | | | | | | | | |
| | | Black | | | | | | | | | |
| | | Tovero | | | | | | | | | |
| | | Silver | | X | | | | | | | |
| | | Pearl | | | | | | | | | |
| | | Bay | | | | | | | | | |
| | | Tovero | | | | | | | | | |
| | Silver | | | X | | | | | | | |
| | Perlino | | | | | | | | | | |
| | Tovero | | | | | | | | | | |
| | Silver | | | X | | | | | | | |
| | Perlino | | | | | | | | | | |
| | Dun | | | | | | | | | | |
| | Tovero | | | | | | | | | | |
| | | Silver | | X | | | | | | | |
| | | Dun | | | | | | | | | |
| | | Pearl | | | | | | | | | |
| | | Black | | | | | | | | | |
| | | Tovero | | | | | | | | | |
| | | Silver | | X | | | | | | | |
| | | Dun | | | | | | | | | |
| | | Pearl | | | | | | | | | |
| | | Bay | | | | | | | | | |
| | | Tovero | | | | | | | | | |
| | Silver | | | X | | | | | | | |
| | Smoky | | | | | | | | | | |
| | Cream | | | | | | | | | | |
| | Tovero | | | | | | | | | | |
| | Smoky | Black | | X | | | | | | | |
| | Black | Cream | | | | | | | | | |
| | Tovero | Tovero | | | | | | | | | |
| | Smoky | | | X | | | | | | | |
| | Cream | | | | | | | | | | |
| | Tovero | | | | | | | | | | |
| | Smoky | Dun | | X | | | | | | | |
| | Grullo | Black | | | | | | | | | |
| | Tovero | Cream | | | | | | | | | |
| | | Tovero | | | | | | | | | |
| | Cham- | | | X | | | | | | | |
| | pagne | | | | | | | | | | |
| | Pearl | | | | | | | | | | |
| | Tovero | | | | | | | | | | |
| | Cream | | | X | | | | | | | |
| | Pearl | | | | | | | | | | |
| | Tovero | | | | | | | | | | |
| | Dun | | | X | | | | | | | |
| | Pearl | | | | | | | | | | |
| | Tovero | | | | | | | | | | |
| | Silver | | | X | | | | | | | |
| | Cham- | | | | | | | | | | |
| | pagne | | | | | | | | | | |
| | Tovero | | | | | | | | | | |
| | Silver | | | X | | | | | | | |
| | Cham- | | | | | | | | | | |
| | pagne | | | | | | | | | | |
| | Pearl | | | | | | | | | | |
| | Tovero | | | | | | | | | | |
| | Silver | | | X | | | | | | | |
| | Cream | | | | | | | | | | |
| | Pearl | | | | | | | | | | |
| | Tovero | | | | | | | | | | |
| | Silver | | | X | | | | | | | |
| | Pearl | | | | | | | | | | |
| | Tovero | | | | | | | | | | |
| | Silver | | | X | | | | | | | |
| | Dun | | | | | | | | | | |
| | Pearl | | | | | | | | | | |
| | Tovero | | | | | | | | | | |
| | Silver | Silver | | X | | | | | | | |
| | Bay | Buck- | | | | | | | | | |
| | Cream | skin | | | | | | | | | |
| | Tovero | Tovero | | | | | | | | | |
| Splash | Amber | Amber | | | X | X/n | X/n | X/n | X/n | | X/n |
| | Dun | Cham- | | | | | | | | | |
| | Splash | pagne | | | | | | | | | |
| | | Dun | | | | | | | | | |
| | | Splash | | | | | | | | | |
| | Amber | Pseudo- | | | X | X/n | X/n | X/n | X/n | | |
| | Dun | cream | | | | | | | | | |
| | Pearl | Amber | | | | | | | | | |
| | Splash | Splash | | | | | | | | | |
| | Bay | | | | X | X/n | X/n | X/n | X/n | | |
| | Splash | | | | | | | | | | |
| | Black | | | | X | X/n | X/n | X/n | X/n | | |
| | Splash | | | | | | | | | | |
| | Buck- | | | | X | X/n | X/n | X/n | X/n | | |
| | skin | | | | | | | | | | |
| | Splash | | | | | | | | | | |
| | | Gold | | | X | X/n | X/n | X/n | X/n | | |
| | | Cham- | | | | | | | | | |
| | | pagne | | | | | | | | | |
| | | Splash | | | | | | | | | |
| | | Classic | | | X | X/n | X/n | X/n | X/n | | |
| | | Cham- | | | | | | | | | |
| | | pagne | | | | | | | | | |
| | | Splash | | | | | | | | | |
| | | Amber | | | X | X/n | X/n | X/n | X/n | | |
| | | Cham- | | | | | | | | | |
| | | pagne | | | | | | | | | |
| | | Splash | | | | | | | | | |
| | Cham- | Classic | | | X | X/n | X/n | X/n | X/n | | |
| | pagne | Cham- | | | | | | | | | |
| | Dun | pagne | | | | | | | | | |
| | Splash | Dun | | | | | | | | | |
| | | Splash | | | | | | | | | |
| | Cham- | Pseudo- | | | X | X/n | X/n | X/n | X/n | | |
| | pagne | cream | | | | | | | | | |
| | Dun | Classic | | | | | | | | | |
| | Pearl | Splash | | | | | | | | | |
| | Splash | | | | | | | | | | |
| | | Cham- | | | X | X/n | X/n | X/n | X/n | | |
| | | pagne | | | | | | | | | |
| | | Gold | | | | | | | | | |
| | | Pearl | | | | | | | | | |
| | | Splash | | | | | | | | | |
| | | Cham- | | | X | X/n | X/n | X/n | X/n | | |
| | | pagne | | | | | | | | | |
| | | Classic | | | | | | | | | |
| | | Pearl | | | | | | | | | |
| | | Splash | | | | | | | | | |
| | | Cham- | | | X | X/n | X/n | X/n | X/n | | |
| | | pagne | | | | | | | | | |
| | | Amber | | | | | | | | | |
| | | Pearl | | | | | | | | | |
| | | Splash | | | | | | | | | |
| | | Gold | | | X | X/n | X/n | X/n | X/n | | |
| | | Cream | | | | | | | | | |
| | | Splash | | | | | | | | | |
| | | Classic | | | X | X/n | X/n | X/n | X/n | | |
| | | Cream | | | | | | | | | |
| | | Splash | | | | | | | | | |
| | | Amber | | | X | X/n | X/n | X/n | X/n | | |
| | | Cream | | | | | | | | | |
| | | Splash | | | | | | | | | |
| | Cream | | | | X | X/n | X/n | X/n | X/n | | |
| | Grullo | | | | | | | | | | |
| | Splash | | | | | | | | | | |
| | | Chest- | | | X | X/n | X/n | X/n | X/n | | |
| | | nut | | | | | | | | | |
| | | Cream | | | | | | | | | |
| | | Pearl | | | | | | | | | |
| | | Splash | | | | | | | | | |
| | | Black | | | X | X/n | X/n | X/n | X/n | | |
| | | Cream | | | | | | | | | |
| | | Pearl | | | | | | | | | |
| | | Splash | | | | | | | | | |
| | | Bay | | | X | X/n | X/n | X/n | X/n | | |
| | | Cream | | | | | | | | | |
| | | Pearl | | | | | | | | | |
| | | Splash | | | | | | | | | |
| | Cremello | | | | X | X/n | X/n | X/n | X/n | | |
| | Splash | | | | | | | | | | |
| | | Red Dun | | | X | X/n | X/n | X/n | X/n | | |
| | | Splash | | | | | | | | | |
| | | Apricot | | | X | X/n | X/n | X/n | X/n | | |
| | | Dun | | | | | | | | | |
| | | Splash | | | | | | | | | |
| | | Gold | | | X | X/n | X/n | X/n | X/n | | |
| | | Dun | | | | | | | | | |
| | | Splash | | | | | | | | | |
| | | Classic | | | X | X/n | X/n | X/n | X/n | | |
| | | Dun | | | | | | | | | |
| | | Splash | | | | | | | | | |
| | | Dun | | | X | X/n | X/n | X/n | X/n | | |
| | | Pearl | | | | | | | | | |
| | | Black | | | | | | | | | |
| | | Splash | | | | | | | | | |
| | | Dun | | | X | X/n | X/n | X/n | X/n | | |
| | | Pearl | | | | | | | | | |
| | | Bay | | | | | | | | | |
| | | Splash | | | | | | | | | |
| | Dunolino | | | | X | X/n | X/n | X/n | X/n | | |
| | Splash | | | | | | | | | | |
| | Dunskin | | | | X | X/n | X/n | X/n | X/n | | |
| | Splash | | | | | | | | | | |
| | Gold | Pseudo- | | | X | X/n | X/n | X/n | X/n | | |
| | Dun | cream | | | | | | | | | |
| | Pearl | Gold | | | | | | | | | |
| | Splash | Splash | | | | | | | | | |
| | Grullo | | | | X | X/n | X/n | X/n | X/n | | |
| | Splash | | | | | | | | | | |
| | Palomino | | | | X | X/n | X/n | X/n | X/n | | |
| | Splash | | | | | | | | | | |
| | | Apricot | | | X | X/n | X/n | X/n | X/n | | |
| | | Pearl | | | | | | | | | |
| | | Splash | | | | | | | | | |
| | | Black | | | X | X/n | X/n | X/n | X/n | | |
| | | Pearl | | | | | | | | | |
| | | Splash | | | | | | | | | |
| | | Bay | | | X | X/n | X/n | X/n | X/n | | |
| | | Pearl | | | | | | | | | |
| | | Splash | | | | | | | | | |
| | Perlino | | | | X | X/n | X/n | X/n | X/n | | |
| | Splash | | | | | | | | | | |
| | Perlino | | | | X | X/n | X/n | X/n | X/n | | |
| | Dun | | | | | | | | | | |
| | Splash | | | | | | | | | | |
| | Red | Chest- | | | X | X/n | X/n | X/n | X/n | | |
| | Splash | nut, | | | | | | | | | |
| | | Sorrel | | | | | | | | | |
| | | Splash | | | | | | | | | |
| | Silver | Silver | | | X | X/n | X/n | X/n | X/n | | |
| | Amber | Amber | | | | | | | | | |
| | Dun | Cham- | | | | | | | | | |
| | Splash | pagne | | | | | | | | | |
| | | Dun | | | | | | | | | |
| | | Splash | | | | | | | | | |
| | | Silver | | | X | X/n | X/n | X/n | X/n | | |
| | | Classic | | | | | | | | | |
| | | Cham- | | | | | | | | | |
| | | pagne | | | | | | | | | |
| | | Splash | | | | | | | | | |
| | | Silver | | | X | X/n | X/n | X/n | X/n | | |
| | | Amber | | | | | | | | | |
| | | Cham- | | | | | | | | | |
| | | pagne | | | | | | | | | |
| | | Splash | | | | | | | | | |
| | Silver | | | | X | X/n | X/n | X/n | X/n | | |
| | Cham- | | | | | | | | | | |
| | pagne | | | | | | | | | | |
| | Dun | | | | | | | | | | |
| | Splash | | | | | | | | | | |
| | | Silver | | | X | X/n | X/n | X/n | X/n | | |
| | | Classic | | | | | | | | | |
| | | Cham- | | | | | | | | | |
| | | pagne | | | | | | | | | |
| | | Pearl | | | | | | | | | |
| | | Splash | | | | | | | | | |
| | | Silver | | | X | X/n | X/n | X/n | X/n | | |
| | | Classic | | | | | | | | | |
| | | Amber | | | | | | | | | |
| | | Pearl | | | | | | | | | |
| | | Splash | | | | | | | | | |
| | | Silver | | | X | X/n | X/n | X/n | X/n | | |
| | | Black | | | | | | | | | |
| | | Cream | | | | | | | | | |
| | | Pearl | | | | | | | | | |
| | | Splash | | | | | | | | | |
| | | Silver | | | X | X/n | X/n | X/n | X/n | | |
| | | Bay | | | | | | | | | |
| | | Cream | | | | | | | | | |
| | | Pearl | | | | | | | | | |
| | | Splash | | | | | | | | | |
| | Silver | Silver | | | X | X/n | X/n | X/n | X/n | | |
| | Dapple | Black | | | | | | | | | |
| | Splash | Splash | | | | | | | | | |
| | Silver | | | | X | X/n | X/n | X/n | X/n | | |
| | Bay | | | | | | | | | | |
| | Splash | | | | | | | | | | |
| | Silver | | | | X | X/n | X/n | X/n | X/n | | |
| | Buck- | | | | | | | | | | |
| | skin | | | | | | | | | | |
| | Splash | | | | | | | | | | |
| | Silver | | | | X | X/n | X/n | X/n | X/n | | |
| | Cream | | | | | | | | | | |
| | Grullo | | | | | | | | | | |
| | Splash | | | | | | | | | | |
| | Silver | Silver | | | X | X/n | X/n | X/n | X/n | | |
| | Dun | Dapple | | | | | | | | | |
| | Splash | Dun | | | | | | | | | |
| | | Splash | | | | | | | | | |
| | Silver | Silver | | | X | X/n | X/n | X/n | X/n | | |
| | Dunskin | Dun Bay | | | | | | | | | |
| | Splash | Cream | | | | | | | | | |
| | | Splash | | | | | | | | | |
| | Silver | Silver | | | X | X/n | X/n | X/n | X/n | | |
| | Grullo | Dun | | | | | | | | | |
| | Splash | Black | | | | | | | | | |
| | | Splash | | | | | | | | | |
| | | Silver | | | X | X/n | X/n | X/n | X/n | | |
| | | Pearl | | | | | | | | | |
| | | Black | | | | | | | | | |
| | | Splash | | | | | | | | | |
| | | Silver | | | X | X/n | X/n | X/n | X/n | | |
| | | Pearl | | | | | | | | | |
| | | Bay | | | | | | | | | |
| | | Splash | | | | | | | | | |
| | Silver | | | | X | X/n | X/n | X/n | X/n | | |
| | Perlino | | | | | | | | | | |
| | Splash | | | | | | | | | | |
| | Silver | | | | X | X/n | X/n | X/n | X/n | | |
| | Perlino | | | | | | | | | | |
| | Dun | | | | | | | | | | |
| | Splash | | | | | | | | | | |
| | | Silver | | | X | X/n | X/n | X/n | X/n | | |
| | | Dun | | | | | | | | | |
| | | Pearl | | | | | | | | | |
| | | Black | | | | | | | | | |
| | | Splash | | | | | | | | | |
| | | Silver | | | X | X/n | X/n | X/n | X/n | | |
| | | Dun | | | | | | | | | |
| | | Pearl | | | | | | | | | |
| | | Bay | | | | | | | | | |
| | | Splash | | | | | | | | | |
| | Silver | | | | X | X/n | X/n | X/n | X/n | | |
| | Smoky | | | | | | | | | | |
| | Cream | | | | | | | | | | |
| | Splash | | | | | | | | | | |
| | Smoky | Black | | | X | X/n | X/n | X/n | X/n | | |
| | Black | Cream | | | | | | | | | |
| | Splash | Splash | | | | | | | | | |
| | Smoky | | | | X | X/n | X/n | X/n | X/n | | |
| | Cream | | | | | | | | | | |
| | Splash | | | | | | | | | | |
| | Smoky | Dun | | | X | X/n | X/n | X/n | X/n | | |
| | Grullo | Black | | | | | | | | | |
| | Splash | Cream | | | | | | | | | |
| | | Splash | | | | | | | | | |
| | Cham- | | | | X | X/n | X/n | X/n | X/n | | |
| | pagne | | | | | | | | | | |
| | Pearl | | | | | | | | | | |
| | Splash | | | | | | | | | | |
| | Cream | | | | X | X/n | X/n | X/n | X/n | | |
| | Pearl | | | | | | | | | | |
| | Splash | | | | | | | | | | |
| | Dun | | | | X | X/n | X/n | X/n | X/n | | |
| | Pearl | | | | | | | | | | |
| | Splash | | | | | | | | | | |
| | Silver | | | | X | X/n | X/n | X/n | X/n | | |
| | Cham- | | | | | | | | | | |
| | pagne | | | | | | | | | | |
| | Splash | | | | | | | | | | |
| | Silver | | | | X | X/n | X/n | X/n | X/n | | |
| | Cham- | | | | | | | | | | |
| | pagne | | | | | | | | | | |
| | Pearl | | | | | | | | | | |
| | Splash | | | | | | | | | | |
| | Silver | | | | X | X/n | X/n | X/n | X/n | | |
| | Cream | | | | | | | | | | |
| | Pearl | | | | | | | | | | |
| | Splash | | | | | | | | | | |
| | Silver | | | | X | X/n | X/n | X/n | X/n | | |
| | Pearl | | | | | | | | | | |
| | Splash | | | | | | | | | | |
| | Silver | | | | X | X/n | X/n | X/n | X/n | | |
| | Dun | | | | | | | | | | |
| | Pearl | | | | | | | | | | |
| | Splash | | | | | | | | | | |
| | Silver | | | | X | X/n | X/n | X/n | X/n | | |
| | Bay | | | | | | | | | | |
| | Cream | | | | | | | | | | |
| | Splash | | | | | | | | | | |
| Tobiano | Amber | Amber | | X | | | | | | | X/n |
| | Dun | Cham- | | | | | | | | | |
| | Tobiano | pagne | | | | | | | | | |
| | | Dun | | | | | | | | | |
| | | Tobiano | | | | | | | | | |
| | Amber | Pseudo- | | X | | | | | | | X/X |
| | Dun | cream | | | | | | | | | |
| | Pearl | Amber | | | | | | | | | |
| | Tobiano | Tobiano | | | | | | | | | |
| | Bay | | | X | | | | | | X/n | X/n |
| | Tobiano | | | | | | | | | | |
| | Black | | | X | | | | | | | |
| | Tobiano | | | | | | | | | | |
| | Buck- | | | X | | | | | | | |
| | skin | | | | | | | | | | |
| | Tobiano | | | | | | | | | | |
| | | Gold | | X | | | | | | | |
| | | Cham- | | | | | | | | | |
| | | pagne | | | | | | | | | |
| | | Tobiano | | | | | | | | | |
| | | Classic | | X | | | | | | | |
| | | Cham- | | | | | | | | | |
| | | pagne | | | | | | | | | |
| | | Tobiano | | | | | | | | | |
| | | Amber | | X | | | | | | | |
| | | Cham- | | | | | | | | | |
| | | pagne | | | | | | | | | |
| | | Tobiano | | | | | | | | | |
| | Cham- | Classic | | X | X | | | | | | |
| | pagne | Cham- | | | | | | | | | |
| | Dun | pagne | | | | | | | | | |
| | Tobiano | Dun | | | | | | | | | |
| | | Tobiano | | | | | | | | | |
| | Cham- | Pseudo- | | X | | | | X/n | | | |
| | pagne | cream | | | | | | | | | |
| | Dun | Classic | | | | | | | | | |
| | Pearl | Tobiano | | | | | | | | | |
| | Tobiano | | | | | | | | | | |
| | | Cham- | | X | | X/n | | | | | |
| | | pagne | | | | | | | | | |
| | | Gold | | | | | | | | | |
| | | Pearl | | | | | | | | | |
| | | Tobiano | | | | | | | | | |
| | | Cham- | | X | | | | | X | | |
| | | pagne | | | | | | | | | |
| | | Classic | | | | | | | | | |
| | | Pearl | | | | | | | | | |
| | | Tobiano | | | | | | | | | |
| | | Cham- | | X | | | X/n | | | | |
| | | pagne | | | | | | | | | |
| | | Amber | | | | | | | | | |
| | | Pearl | | | | | | | | | |
| | | Tobiano | | | | | | | | | |
| | | Gold | | X | | | | | | | |
| | | Cream | | | | | | | | | |
| | | Tobiano | | | | | | | | | |
| | | Classic | | X | | | | | | | |
| | | Cream | | | | | | | | | |
| | | Tobiano | | | | | | | | | |
| | | Amber | | X | | | | | | | |
| | | Cream | | | | | | | | | |
| | | Tobiano | | | | | | | | | |
| | Cream | | | X | | | | | | | |
| | Grullo | | | | | | | | | | |
| | Tobiano | | | | | | | | | | |
| | | Chest- | | X | | | | | | | |
| | | nut | | | | | | | | | |
| | | Cream | | | | | | | | | |
| | | Pearl | | | | | | | | | |
| | | Tobiano | | | | | | | | | |
| | | Black | | X | | | | | | | |
| | | Cream | | | | | | | | | |
| | | Pearl | | | | | | | | | |
| | | Tobiano | | | | | | | | | |
| | | Bay | | X | | | | | | | |
| | | Cream | | | | | | | | | |
| | | Pearl | | | | | | | | | |
| | | Tobiano | | | | | | | | | |
| | Cremello | | | X | | | | | | | |
| | Tobiano | | | | | | | | | | |
| | | Red Dun | | X | | | | | | | |
| | | Tobiano | | | | | | | | | |
| | | Apricot | | X | | | | | | | |
| | | Dun | | | | | | | | | |
| | | Tobiano | | | | | | | | | |
| | | Gold | | X | | | | | | | |
| | | Dun | | | | | | | | | |
| | | Tobiano | | | | | | | | | |
| | | Classic | | X | | | | | | | |
| | | Dun | | | | | | | | | |
| | | Tobiano | | | | | | | | | |
| | | Dun | | X | | | | | | | |
| | | Pearl | | | | | | | | | |
| | | Black | | | | | | | | | |
| | | Tobiano | | | | | | | | | |
| | | Dun | | X | | | | | | | |
| | | Pearl | | | | | | | | | |
| | | Bay | | | | | | | | | |
| | | Tobiano | | | | | | | | | |
| | Dunolino | | | X | | | | | | | |
| | Tobiano | | | | | | | | | | |
| | Dunskin | | | X | | | | | | | |
| | Tobiano | | | | | | | | | | |
| | Gold Dun | Pseudo- | | X | | | | | | | |
| | Pearl | cream | | | | | | | | | |
| | Tobiano | Gold | | | | | | | | | |
| | | Tobiano | | | | | | | | | |
| | Grullo | | | X | | | | | | | |
| | Tobiano | | | | | | | | | | |
| | Palomino | | | X | | | | | | | |
| | Tobiano | | | | | | | | | | |
| | | Apricot | | X | | | | | | | |
| | | Pearl | | | | | | | | | |
| | | Tobiano | | | | | | | | | |
| | | Black | | X | | | | | | | |
| | | Pearl | | | | | | | | | |
| | | Tobiano | | | | | | | | | |
| | | Bay | | X | | | | | | | |
| | | Pearl | | | | | | | | | |
| | | Tobiano | | | | | | | | | |
| | Perlino | | | X | | | | | | | |
| | Tobiano | | | | | | | | | | |
| | Perlino | | | X | | | | | | | |
| | Dun | | | | | | | | | | |
| | Tobiano | | | | | | | | | | |
| | Red | Chest- | | X | | | | | | | |
| | Tobiano | nut, | | | | | | | | | |
| | | Sorrel | | | | | | | | | |
| | Silver | Silver | | X | | | | | | | |
| | Amber | Amber | | | | | | | | | |
| | Dun | Cham- | | | | | | | | | |
| | Tobiano | pagne | | | | | | | | | |
| | | Dun | | | | | | | | | |
| | | Tobiano | | | | | | | | | |
| | | Silver | | X | | | | | | | |
| | | Classic | | | | | | | | | |
| | | Cham- | | | | | | | | | |
| | | pagne | | | | | | | | | |
| | | Tobiano | | | | | | | | | |
| | | Silver | | X | | | | | | | |
| | | Amber | | | | | | | | | |
| | | Cham- | | | | | | | | | |
| | | pagne | | | | | | | | | |
| | | Tobiano | | | | | | | | | |
| | Silver | | | X | | | | | | | |
| | Cham- | | | | | | | | | | |
| | pagne | | | | | | | | | | |
| | Dun | | | | | | | | | | |
| | Tobiano | | | | | | | | | | |
| | | Silver | | X | | | | | | | |
| | | Classic | | | | | | | | | |
| | | Cham- | | | | | | | | | |
| | | pagne | | | | | | | | | |
| | | Pearl | | | | | | | | | |
| | | Tobiano | | | | | | | | | |
| | | Silver | | X | | | | | | | |
| | | Classic | | | | | | | | | |
| | | Amber | | | | | | | | | |
| | | Pearl | | | | | | | | | |
| | | Tobiano | | | | | | | | | |
| | | Silver | | X | | | | | | | |
| | | Black | | | | | | | | | |
| | | Cream | | | | | | | | | |
| | | Pearl | | | | | | | | | |
| | | Tobiano | | | | | | | | | |
| | | Silver | | X | | | | | | | |
| | | Bay | | | | | | | | | |
| | | Cream | | | | | | | | | |
| | | Pearl | | | | | | | | | |
| | | Tobiano | | | | | | | | | |
| | Silver | Silver | | X | | | | | | | |
| | Dapple | Black | | | | | | | | | |
| | Tobiano | Tobiano | | | | | | | | | |
| | Silver | | | X | | | | | | | |
| | Bay | | | | | | | | | | |
| | Tobiano | | | | | | | | | | |
| | Silver | | | X | | | | | | | |
| | Buck- | | | | | | | | | | |
| | skin | | | | | | | | | | |
| | Tobiano | | | | | | | | | | |
| | Silver | | | X | | | | | | | |
| | Cream | | | | | | | | | | |
| | Grullo | | | | | | | | | | |
| | Tobiano | | | | | | | | | | |
| | Silver | Silver | | X | | | | | | | |
| | Dun | Dapple | | | | | | | | | |
| | Tobiano | Dun | | | | | | | | | |
| | | Tobiano | | | | | | | | | |
| | Silver | Silver | | X | | | | | | | |
| | Dunskin | Dun Bay | | | | | | | | | |
| | Tobiano | Cream | | | | | | | | | |
| | | Tobiano | | | | | | | | | |
| | Silver | Silver | | X | | | | | | | |
| | Grullo | Dun | | | | | | | | | |
| | Tobiano | Black | | | | | | | | | |
| | | Tobiano | | | | | | | | | |
| | | Silver | | X | | | | | | | |
| | | Pearl | | | | | | | | | |
| | | Black | | | | | | | | | |
| | | Tobiano | | | | | | | | | |
| | | Silver | | X | | | | | | | |
| | | Pearl | | | | | | | | | |
| | | Bay | | | | | | | | | |
| | | Tobiano | | | | | | | | | |
| | Silver | | | X | | | | | | | |
| | Perlino | | | | | | | | | | |
| | Tobiano | | | | | | | | | | |
| | Silver | | | X | | | | | | | |
| | Perlino | | | | | | | | | | |
| | Dun | | | | | | | | | | |
| | Tobiano | | | | | | | | | | |
| | | Silver | | X | | | | | | | |
| | | Dun | | | | | | | | | |
| | | Pearl | | | | | | | | | |
| | | Black | | | | | | | | | |
| | | Tobiano | | | | | | | | | |
| | | Silver | | X | | | | | | | |
| | | Dun | | | | | | | | | |
| | | Pearl | | | | | | | | | |
| | | Bay | | | | | | | | | |
| | | Tobiano | | | | | | | | | |
| | Silver | | | X | | | | | | | |
| | Smoky | | | | | | | | | | |
| | Cream | | | | | | | | | | |
| | Tobiano | | | | | | | | | | |
| | Smoky | Black | | X | | | | | | | |
| | Black | Cream | | | | | | | | | |
| | Tobiano | Tobiano | | | | | | | | | |
| | Smoky | | | X | | | | | | | |
| | Cream | | | | | | | | | | |
| | Tobiano | | | | | | | | | | |
| | Smoky | Dun | | X | | | | | | | |
| | Grullo | Black | | | | | | | | | |
| | Tobiano | Cream | | | | | | | | | |
| | | Tobiano | | | | | | | | | |
| | Cham- | | | X | | | | | | | |
| | pagne | | | | | | | | | | |
| | Pearl | | | | | | | | | | |
| | Tobiano | | | | | | | | | | |
| | Cream | | | X | | | | | | | |
| | Pearl | | | | | | | | | | |
| | Tobiano | | | | | | | | | | |
| | Dun | | | X | | | | | | | |
| | Pearl | | | | | | | | | | |
| | Tobiano | | | | | | | | | | |
| | Silver | | | X | | | | | | | |
| | Cham- | | | | | | | | | | |
| | pagne | | | | | | | | | | |
| | Tobiano | | | | | | | | | | |
| | Silver | | | X | | | | | | | |
| | Cham- | | | | | | | | | | |
| | pagne | | | | | | | | | | |
| | Pearl | | | | | | | | | | |
| | Tobiano | | | | | | | | | | |
| | Silver | | | X | | | | | | | |
| | Cream | | | | | | | | | | |
| | Pearl | | | | | | | | | | |
| | Tobiano | | | | | | | | | | |
| | Silver | | | X | | | | | | | |
| | Pearl | | | | | | | | | | |
| | Tobiano | | | | | | | | | | |
| | Silver | | | X | | | | | | | |
| | Dun | | | | | | | | | | |
| | Pearl | | | | | | | | | | |
| | Tobiano | | | | | | | | | | |
| | Silver | | | | | | | | | | |
| | Bay | | | | | | | | | | |
| | Cream | | | | | | | | | | |
| | Tobiano | | | | | | | | | | |
| Sabino | Amber | Amber | | | | | | | | | X/n |
| | Dun | Cham- | | | | | | | | | |
| | Sabino | pagne | | | | | | | | | |
| | | Dun | | | | | | | | | |
| | | Sabino | | | | | | | | | |
| | Amber | Pseudo- | | | | | | | | | X/X |
| | Dun | cream | | | | | | | | | |
| | Pearl | Amber | | | | | | | | | |
| | Sabino | Sabino | | | | | | | | | |
| | Bay | | X | | | | | | | X/n | X/n |
| | Sabino | | | | | | | | | | |
| | Black | | X | | | | | | | | |
| | Sabino | | | | | | | | | | |
| | Buck- | | X | | | | | | | | |
| | skin | | | | | | | | | | |
| | Sabino | | | | | | | | | | |
| | | Gold | X | | | | | | | | |
| | | Cham- | | | | | | | | | |
| | | pagne | | | | | | | | | |
| | | Sabino | | | | | | | | | |
| | | Classic | X | | | | | | | | |
| | | Cham- | | | | | | | | | |
| | | pagne | | | | | | | | | |
| | | Sabino | | | | | | | | | |
| | | Amber | X | | | | | | | | |
| | | Cham- | | | | | | | | | |
| | | pagne | | | | | | | | | |
| | | Sabino | | | | | | | | | |
| | Cham- | Classic | X | | X | | | | | | |
| | pagne | Cham- | | | | | | | | | |
| | Dun | pagne | | | | | | | | | |
| | Sabino | Dun | | | | | | | | | |
| | | Sabino | | | | | | | | | |
| | Cham- | Pseudo- | X | | | | | X/n | | | |
| | pagne | cream | | | | | | | | | |
| | Dun | Classic | | | | | | | | | |
| | Pearl | Sabino | | | | | | | | | |
| | Sabino | | | | | | | | | | |
| | | Cham- | X | | | X/n | | | | | |
| | | pagne | | | | | | | | | |
| | | Gold | | | | | | | | | |
| | | Pearl | | | | | | | | | |
| | | Sabino | | | | | | | | | |
| | | Cham- | X | | | | | | X | | |
| | | pagne | | | | | | | | | |
| | | Classic | | | | | | | | | |
| | | Pearl | | | | | | | | | |
| | | Sabino | | | | | | | | | |
| | | Cham- | X | | | | X/n | | | | |
| | | pagne | | | | | | | | | |
| | | Amber | | | | | | | | | |
| | | Pearl | | | | | | | | | |
| | | Sabino | | | | | | | | | |
| | | Gold | X | | | | | | | | |
| | | Cream | | | | | | | | | |
| | | Sabino | | | | | | | | | |
| | | Classic | X | | | | | | | | |
| | | Cream | | | | | | | | | |
| | | Sabino | | | | | | | | | |
| | | Amber | X | | | | | | | | |
| | | Cream | | | | | | | | | |
| | | Sabino | | | | | | | | | |
| | Cream | | X | | | | | | | | |
| | Grullo | | | | | | | | | | |
| | Sabino | | | | | | | | | | |
| | | Chest- | X | | | | | | | | |
| | | nut | | | | | | | | | |
| | | Cream | | | | | | | | | |
| | | Pearl | | | | | | | | | |
| | | Sabino | | | | | | | | | |
| | | Black | X | | | | | | | | |
| | | Cream | | | | | | | | | |
| | | Pearl | | | | | | | | | |
| | | Sabino | | | | | | | | | |
| | | Bay | X | | | | | | | | |
| | | Cream | | | | | | | | | |
| | | Pearl | | | | | | | | | |
| | | Sabino | | | | | | | | | |
| | Cremello | | X | | | | | | | | |
| | Sabino | | | | | | | | | | |
| | | Red Dun | X | | | | | | | | |
| | | Sabino | | | | | | | | | |
| | | Apricot | X | | | | | | | | |
| | | Dun | | | | | | | | | |
| | | Sabino | | | | | | | | | |
| | | Gold | X | | | | | | | | |
| | | Dun | | | | | | | | | |
| | | Sabino | | | | | | | | | |
| | | Classic | X | | | | | | | | |
| | | Dun | | | | | | | | | |
| | | Sabino | | | | | | | | | |
| | | Dun | X | | | | | | | | |
| | | Pearl | | | | | | | | | |
| | | Black | | | | | | | | | |
| | | Sabino | | | | | | | | | |
| | | Dun | X | | | | | | | | |
| | | Pearl | | | | | | | | | |
| | | Bay | | | | | | | | | |
| | | Sabino | | | | | | | | | |
| | Dunolino | | X | | | | | | | | |
| | Sabino | | | | | | | | | | |
| | Dunskin | | X | | | | | | | | |
| | Sabino | | | | | | | | | | |
| | Gold Dun | Pseudo- | X | | | | | | | | |
| | Pearl | cream | | | | | | | | | |
| | Sabino | Gold | | | | | | | | | |
| | | Sabino | | | | | | | | | |
| | Grullo | | X | | | | | | | | |
| | Sabino | | | | | | | | | | |
| | Palomino | | X | | | | | | | | |
| | Sabino | | | | | | | | | | |
| | | Apricot | X | | | | | | | | |
| | | Pearl | | | | | | | | | |
| | | Sabino | | | | | | | | | |
| | | Black | X | | | | | | | | |
| | | Pearl | | | | | | | | | |
| | | Sabino | | | | | | | | | |
| | | Bay | X | | | | | | | | |
| | | Pearl | | | | | | | | | |
| | | Sabino | | | | | | | | | |
| | Perlino | | X | | | | | | | | |
| | Sabino | | | | | | | | | | |
| | Perlino | | X | | | | | | | | |
| | Dun | | | | | | | | | | |
| | Sabino | | | | | | | | | | |
| | Red | Chest- | X | | | | | | | | |
| | Sabino | nut | | | | | | | | | |
| | | Sorrel | | | | | | | | | |
| | | Sabino | | | | | | | | | |
| | Silver | Silver | X | | | | | | | | |
| | Amber | Amber | | | | | | | | | |
| | Dun | Cham- | | | | | | | | | |
| | Sabino | pagne | | | | | | | | | |
| | | Dun | | | | | | | | | |
| | | Sabino | | | | | | | | | |
| | | Silver | X | | | | | | | | |
| | | Classic | | | | | | | | | |
| | | Cham- | | | | | | | | | |
| | | pagne | | | | | | | | | |
| | | Sabino | | | | | | | | | |
| | | Silver | X | | | | | | | | |
| | | Amber | | | | | | | | | |
| | | Cham- | | | | | | | | | |
| | | pagne | | | | | | | | | |
| | | Sabino | | | | | | | | | |
| | Silver | | X | | | | | | | | |
| | Cham- | | | | | | | | | | |
| | pagne | | | | | | | | | | |
| | Dun | | | | | | | | | | |
| | Sabino | | | | | | | | | | |
| | | Silver | X | | | | | | | | |
| | | Classic | | | | | | | | | |
| | | Cham- | | | | | | | | | |
| | | pagne | | | | | | | | | |
| | | Pearl | | | | | | | | | |
| | | Sabino | | | | | | | | | |
| | | Silver | X | | | | | | | | |
| | | Classic | | | | | | | | | |
| | | Amber | | | | | | | | | |
| | | Pearl | | | | | | | | | |
| | | Sabino | | | | | | | | | |
| | | Silver | X | | | | | | | | |
| | | Black | | | | | | | | | |
| | | Cream | | | | | | | | | |
| | | Pearl | | | | | | | | | |
| | | Sabino | | | | | | | | | |
| | | Silver | X | | | | | | | | |
| | | Bay | | | | | | | | | |
| | | Cream | | | | | | | | | |
| | | Pearl | | | | | | | | | |
| | | Sabino | | | | | | | | | |
| | Silver | Silver | X | | | | | | | | |
| | Dapple | Black | | | | | | | | | |
| | Sabino | Sabino | | | | | | | | | |
| | Silver | | X | | | | | | | | |
| | Bay | | | | | | | | | | |
| | Sabino | | | | | | | | | | |
| | Silver | | X | | | | | | | | |
| | Buck- | | | | | | | | | | |
| | skin | | | | | | | | | | |
| | Sabino | | | | | | | | | | |
| | Silver | | X | | | | | | | | |
| | Cream | | | | | | | | | | |
| | Grullo | | | | | | | | | | |
| | Sabino | | | | | | | | | | |
| | Silver | Silver | X | | | | | | | | |
| | Dun | Dapple | | | | | | | | | |
| | Sabino | Dun | | | | | | | | | |
| | | Sabino | | | | | | | | | |
| | Silver | Silver | X | | | | | | | | |
| | Dunskin | Dun Bay | | | | | | | | | |
| | Sabino | Cream | | | | | | | | | |
| | | Sabino | | | | | | | | | |
| | Silver | Silver | X | | | | | | | | |
| | Grullo | Dun | | | | | | | | | |
| | Sabino | Black | | | | | | | | | |
| | | Sabino | | | | | | | | | |
| | | Silver | X | | | | | | | | |
| | | Pearl | | | | | | | | | |
| | | Black | | | | | | | | | |
| | | Sabino | | | | | | | | | |
| | | Silver | X | | | | | | | | |
| | | Pearl | | | | | | | | | |
| | | Bay | | | | | | | | | |
| | | Sabino | | | | | | | | | |
| | Silver | | X | | | | | | | | |
| | Perlino | | | | | | | | | | |
| | Sabino | | | | | | | | | | |
| | Silver | | X | | | | | | | | |
| | Perlino | | | | | | | | | | |
| | Dun | | | | | | | | | | |
| | Sabino | | | | | | | | | | |
| | | Silver | X | | | | | | | | |
| | | Dun | | | | | | | | | |
| | | Pearl | | | | | | | | | |
| | | Black | | | | | | | | | |
| | | Sabino | | | | | | | | | |
| | | Silver | X | | | | | | | | |
| | | Dun | | | | | | | | | |
| | | Pearl | | | | | | | | | |
| | | Bay | | | | | | | | | |
| | | Sabino | | | | | | | | | |
| | Silver | | X | | | | | | | | |
| | Smoky | | | | | | | | | | |
| | Cream | | | | | | | | | | |
| | Sabino | | | | | | | | | | |
| | Smoky | Black | X | | | | | | | | |
| | Black | Cream | | | | | | | | | |
| | Sabino | Sabino | | | | | | | | | |
| | Smoky | | X | | | | | | | | |
| | Cream | | | | | | | | | | |
| | Sabino | | | | | | | | | | |
| | Smoky | Dun | X | | | | | | | | |
| | Grullo | Black | | | | | | | | | |
| | Sabino | Cream | | | | | | | | | |
| | | Sabino | | | | | | | | | |
| | Cham- | | X | | | | | | | | |
| | pagne | | | | | | | | | | |
| | Pearl | | | | | | | | | | |
| | Sabino | | | | | | | | | | |
| | Cream | | X | | | | | | | | |
| | Pearl | | | | | | | | | | |
| | Sabino | | | | | | | | | | |
| | Dun | | X | | | | | | | | |
| | Pearl | | | | | | | | | | |
| | Sabino | | | | | | | | | | |
| | Silver | | X | | | | | | | | |
| | Cham- | | | | | | | | | | |
| | pagne | | | | | | | | | | |
| | Sabino | | | | | | | | | | |
| | Silver | | X | | | | | | | | |
| | Cham- | | | | | | | | | | |
| | pagne | | | | | | | | | | |
| | Pearl | | | | | | | | | | |
| | Sabino | | | | | | | | | | |
| | Silver | | X | | | | | | | | |
| | Cream | | | | | | | | | | |
| | Pearl | | | | | | | | | | |
| | Sabino | | | | | | | | | | |
| | Silver | | X | | | | | | | | |
| | Pearl | | | | | | | | | | |
| | Sabino | | | | | | | | | | |
| | Silver | | X | | | | | | | | |
| | Dun | | | | | | | | | | |
| | Pearl | | | | | | | | | | |
| | Sabino | | | | | | | | | | |
| | Silver | | | | | | | | | | |
| | Bay | | | | | | | | | | |
| | Cream | | | | | | | | | | |
| | Tobiano | | | | | | | | | | |

TABLE 6
Referential table for potentially deleterious or fatal coat color/coat color modification genotypes

| Coat | | | | | | | |
|---|---|---|---|---|---|---|---|
| color/modification | EDNRB_TC_to_AG | KITW2 | KITW5 | KITW6 | KITW7 | KITW10 | KITW12 |
| Dominant White | | | | | | X/X | |
| W10/W10 | | | | | | | |
| Dominant White | | | | | | | X/X |
| W12/W12 | | | | | | | |
| Dominant White | | | | | | | |
| W13/W13 | | | | | | | |
| Dominant White | | | | | | | |
| W14/W14 | | | | | | | |
| Dominant White | | | | | | | |
| W19/W19 | | | | | | | |
| Dominant White | | X/X | | | | | |
| W2/W2 | | | | | | | |
| Dominant White | | | X/X | | | | |
| W5/W5 | | | | | | | |
| Dominant White | | | | X/X | | | |
| W6/W6 | | | | | | | |
| Dominant White | | | | | X/X | | |
| W7/W7 | | | | | | | |
| Lethal Frame | X/X | | | | | | |
| Overo (LWO) | | | | | | | |

| Coat | | | | |
|---|---|---|---|---|
| color/modification | KITW13 | KITW14 | KITW19 | Description |
| Dominant White | | | | Two W10 variants may be incompatible with |
| W10/W10 | | | | life - estimated 25% chance of no foal. |
| Dominant White | | | | Two W12 variants may be incompatible with |
| W12/W12 | | | | life - estimated 25% chance of no foal. |
| Dominant White | X/X | | | Two W13 variants may be incompatible with |
| W13/W13 | | | | life - estimated 25% chance of no foal. |
| Dominant White | | X/X | | Two W14 variants may be incompatible with |
| W14/W14 | | | | life - estimated 25% chance of no foal. |
| Dominant White | | | X/X | Two W19 variants may result in all white coat |
| W19/W19 | | | | and possible health issues, growth issues, or |
| | | | | foal death. |
| Dominant White | | | | Two W2 variants may be incompatible with |
| W2/W2 | | | | life - estimated 25% chance of no foal. |
| Dominant White | | | | Two W5 variants may be incompatible with |
| W5/W5 | | | | life - estimated 25% chance of no foal. |
| Dominant White | | | | Two W6 variants may be incompatible with |
| W6/W6 | | | | life - estimated 25% chance of no foal. |
| Dominant White | | | | Two W7 variants may be incompatible with |
| W7/W7 | | | | life - estimated 25% chance of no foal. |
| Lethal Frame | | | | Two LWO variants are known to lead to |
| Overo (LWO) | | | | Lethal White Syndrome; results in failed |
| | | | | pregnancy or foal death. |

TABLE 7
Referential table for disease and non-disease conditions in horses

| Disease or | | | | | | | |
|---|---|---|---|---|---|---|---|
| non-disease | | | | | | | |
| condition | MUTYHCA | SLC5A3FIS | GBE1GBED | PPIBHERDA | LAMC2JEB1 | LAMA3JEB2 | MYO5ALFS |
| Cerebellar | X | | | | | | |
| Abiotrophy (CA) | | | | | | | |
| Foal | | X | | | | | |
| Immunodeficiency | | | | | | | |
| Syndrome (FIS) | | | | | | | |
| Glycogen | | | X | | | | |
| Branching Enzyme | | | | | | | |
| Deficiency (GBED) | | | | | | | |
| Hereditary Equine | | | | X | | | |
| Regional Dermal | | | | | | | |
| Asthenia | | | | | | | |
| (HERDA) | | | | | | | |
| Junctional | | | | | X | | |
| Epidermolysis | | | | | | | |
| Bullosis | | | | | | | |
| (type 1; JEB1) | | | | | | | |
| Junctional | | | | | | X | |
| Epidermolysis | | | | | | | |
| Bullosis | | | | | | | |
| (type 2; JEB2) | | | | | | | |
| Lavender Foal | | | | | | | X |
| Syndrome (LFS) | | | | | | | |
| Malignant | | | | | | | |
| Hyperthermia | | | | | | | |
| (MH) | | | | | | | |
| Myotonia | | | | | | | |
| Polysaccharide | | | | | | | |
| Storage Myopathy | | | | | | | |
| (type 1; PSSM1) | | | | | | | |
| Severe Combined | | | | | | | |
| Immunodeficiency | | | | | | | |
| Warmblood | | | | | | | |
| Fragile Foal | | | | | | | |
| Syndrome (FFS) | | | | | | | |
| Hoof Wall | | | | | | | |
| Separation Disease | | | | | | | |
| (HWSD) | | | | | | | |
| Hydrocephalu [symbol] | | | | | | | |
| (HYD) | | | | | | | |
| Hyperkalemic | | | | | | | |
| Partial Paralysis | | | | | | | |
| (HYPP) | | | | | | | |

| Disease or | | | | | | |
|---|---|---|---|---|---|---|
| non-disease | | | | | | |
| condition | RYR1MH | CLCN4MYT | GYS1PSSM1 | DNAPKSCID | PLOD1WFFS | SERPINB11HWSD |
| Cerebellar | | | | | | |
| Abiotrophy (CA) | | | | | | |
| Foal | | | | | | |
| Immunodeficiency | | | | | | |
| Syndrome (FIS) | | | | | | |
| Glycogen | | | | | | |
| Branching Enzyme | | | | | | |
| Deficiency (GBED) | | | | | | |
| Hereditary Equine | | | | | | |
| Regional Dermal | | | | | | |
| Asthenia | | | | | | |
| (HERDA) | | | | | | |
| Junctional | | | | | | |
| Epidermolysis | | | | | | |
| Bullosis | | | | | | |
| (type 1; JEB1) | | | | | | |
| Junctional | | | | | | |
| Epidermolysis | | | | | | |
| Bullosis | | | | | | |
| (type 2; JEB2) | | | | | | |
| Lavender Foal | | | | | | |
| Syndrome (LFS) | | | | | | |
| Malignant | X/X | | | | | |
| Hyperthermia | | | | | | |
| (MH) | | | | | | |
| Myotonia | | X/X | | | | |
| Polysaccharide | | | X/X | | | |
| Storage Myopathy | | | | | | |
| (type 1; PSSM1) | | | | | | |
| Severe Combined | | | | X | | |
| Immunodeficiency | | | | | | |
| Warmblood | | | | | X | |
| Fragile Foal | | | | | | |
| Syndrome (FFS) | | | | | | |
| Hoof Wall | | | | | | X |
| Separation Disease | | | | | | |
| (HWSD) | | | | | | |
| Hydrocephalu [symbol] | | | | | | |
| (HYD) | | | | | | |
| Hyperkalemic | | | | | | |
| Partial Paralysis | | | | | | |
| (HYPP) | | | | | | |

| Disease or | | | |
|---|---|---|---|
| non-disease | | | |
| condition | B3GALNT2hydroceph | SCN4AHYPP | Description |
| Cerebellar | | | Two CA variants - may result in mild to severe |
| Abiotrophy (CA) | | | neurological symptoms. One CA variant - may |
| | | | result in mild to severe neurological symptoms. |
| Foal | | | Two FIS variants - may exhibit signs of anemia, |
| Immunodeficiency | | | diarrhea, and pneumonia due to a failing immune |
| Syndrome (FIS) | | | system which can lead to foal death. One FIS |
| | | | variant - may exhibit signs of anemia, diarrhea, |
| | | | and pneumonia due to a failing immune system |
| | | | which can lead to foal death. |
| Glycogen | | | Two GBED variants - may lead to failed |
| Branching Enzyme | | | pregnancy and/or severely compromised/dead foal. |
| Deficiency (GBED) | | | One GBED variant - may lead to failed pregnancy |
| | | | and/or severely compromised/dead foal. |
| Hereditary Equine | | | Two HERDA variants - may result in serious |
| Regional Dermal | | | skin-related damage resulting in severe/fatal |
| Asthenia | | | health issues. One HERDA variant - may result |
| (HERDA) | | | in serious skin-related damage resulting in |
| | | | severe/fatal health issues. |
| Junctional | | | Two JEB1 variants - may exhibit serious health |
| Epidermolysis | | | issues, such as blisters at pressure points, hoof |
| Bullosis | | | detachment, and oral ulcer, resulting foal death. |
| (type 1; JEB1) | | | One JEB1 variant - may exhibit serious health |
| | | | issues, such as blisters at pressure points, hoof |
| | | | detachment, and oral ulcer, resulting foal death. |
| Junctional | | | Two JEB2 variants - may exhibit serious health |
| Epidermolysis | | | issues, such as blisters at pressure points, hoof |
| Bullosis | | | detachment, and oral ulcer, resulting foal death. |
| (type 2; JEB2) | | | One JEB2 variant - may exhibit serious health |
| | | | issues, such as blisters at pressure points, hoof |
| | | | detachment, and oral ulcer, resulting foal death. |
| Lavender Foal | | | Two LFS variants - may lead to failed pregnancy |
| Syndrome (LFS) | | | and/or severely compromised/dead foal. One |
| | | | LFS variant - may lead to failed pregnancy and/or |
| | | | severely compromised/dead foal. |
| Malignant | | | Two MH variants - may result in severe health |
| Hyperthermia | | | issues, such as fever, increased heart rate, high |
| (MH) | | | blood pressure, seating, acidosis, and muscle |
| | | | rigidity. |
| Myotonia | | | Two Myotonia variants - may result in health |
| | | | issues due to problems with muscle stiffness. |
| Polysaccharide | | | Two PSSM1 variants - may result in severe |
| Storage Myopathy | | | chronic exertional rhabdomyolysis (“tying-up”) |
| (type 1; PSSM1) | | | episodes which may lead to health issues. |
| Severe Combined | | | Two SCI variants; may exhibit signs of fever, |
| Immunodeficiency | | | diarrhea, and respiratory distress due to a failing |
| | | | immune system which can lead to foal death. |
| | | | One FIS variant - may exhibit signs of fever, |
| | | | diarrhea, and respiratory distress due to a failing |
| | | | immune system which can lead to foal death. |
| Warmblood | | | Two FFS variants - may lead to failed pregnancy |
| Fragile Foal | | | and/or severely compromised/dead foal. |
| Syndrome (FFS) | | | One FFS variant - may lead to failed pregnancy |
| | | | and/or severely compromised/dead foal |
| Hoof Wall | | | Two HWSD variants - may result in serious hoof |
| Separation Disease | | | wall damage or failure which may lead to severe |
| (HWSD) | | | mobility and health issues. One HWSD |
| | | | variant - may result in serious hoof wall damage |
| | | | or failure which may lead to severe mobility and |
| | | | health issues. |
| Hydrocephalu [symbol] | X | | Two HYD variants - may lead to failed pregnancy |
| (HYD) | | | and/or severely compromised/dead foal. |
| | | | One HYD variant - may lead to failed pregnancy |
| | | | and/or severely compromised/dead foal |
| Hyperkalemic | | X/X | Two HYPP variants - may result in tremors and |
| Partial Paralysis | | | muscles weakness which may lead to severe |
| (HYPP) | | | paralysis and/or death. |

[symbol]

indicates data missing or illegible when filed

TABLE 8
Referential table for disease and non-disease conditions in horses (continued)

| Disease or | | | | | | |
|---|---|---|---|---|---|---|
| non-disease | | | | | | |
| condition | ARAS | BIEC2263524EMS | BIEC2536712WB_ERU_Risk | SCN4AHYPP | FKBP6IAR1 | FKBP6IAR2 |
| Androgen | X | | | | | |
| Insensitivity (AI) | | | | | | |
| Equine Metabolic | | X | | | | |
| Syndrome - Risk | | | | | | |
| (EMS) | | | | | | |
| Equine Recurrent | | | X | | | |
| Uveitis - Risk | | | | | | |
| (ERU) | | | | | | |
| Hyperkalemic | | | | X/n | | |
| Partial Paralysis | | | | | | |
| (HYPP) | | | | | | |
| Impaired | | | | | X/X | X/X |
| Acrosomal | | | | | | |
| Reaction (IAR) | | | | | | |
| Laminitis Risk | | | | | | |
| (LAM) | | | | | | |
| Lordosis (affected) | | | | | | |
| Lordosis (carrier) | | | | | | |
| Malignant | | | | | | |
| Hyper-thermia | | | | | | |
| (MH) | | | | | | |
| Myotonia (MYT) | | | | | | |
| Polysaccharide | | | | | | |
| Storage Myopathy | | | | | | |
| (type 1; PSSM) | | | | | | |
| Squamous Cell | | | | | | |
| Carcinoma | | | | | | |
| (SCC) - Risk | | | | | | |
| West Nile | | | | | | |
| Virus (WNV) | | | | | | |
| Susceptibility | | | | | | |
| Naked Foal | | | | | | |
| Syndrome (NFS) | | | | | | |
| Dwarfism (affected) | | | | | | |
| Dwarfism (carrier) | | | | | | |

| Disease or | | | | | | |
|---|---|---|---|---|---|---|
| non-disease | | | | | | |
| condition | BIEC2263524_LAM | BIEC2532523L1 | BiEC2532534L2 | BIEC2532578L3 | BIEC2532658L4 | RYR1MH |
| Androgen | | | | | | |
| Insensitivity (AI) | | | | | | |
| Equine Metabolic | | | | | | |
| Syndrome - Risk | | | | | | |
| (EMS) | | | | | | |
| Equine Recurrent | | | | | | |
| Uveitis - Risk | | | | | | |
| (ERU) | | | | | | |
| Hyperkalemic | | | | | | |
| Partial Paralysis | | | | | | |
| (HYPP) | | | | | | |
| Impaired | | | | | | |
| Acrosomal | | | | | | |
| Reaction (IAR) | | | | | | |
| Laminitis Risk | X | | | | | |
| (LAM) | | | | | | |
| Lordosis (affected) | | X/X | X/X | X/X | X/X | |
| Lordosis (carrier) | | X/n | X/n | X/n | X/n | |
| Malignant | | | | | | X/n |
| Hyper-thermia | | | | | | |
| (MH) | | | | | | |
| Myotonia (MYT) | | | | | | |
| Polysaccharide | | | | | | |
| Storage Myopathy | | | | | | |
| (type 1; PSSM) | | | | | | |
| Squamous Cell | | | | | | |
| Carcinoma | | | | | | |
| (SCC) - Risk | | | | | | |
| West Nile | | | | | | |
| Virus (WNV) | | | | | | |
| Susceptibility | | | | | | |
| Naked Foal | | | | | | |
| Syndrome (NFS) | | | | | | |
| Dwarfism (affected) | | | | | | |
| Dwarfism (carrier) | | | | | | |

| Disease or | | | | | | | |
|---|---|---|---|---|---|---|---|
| non-disease | | | | | | | |
| condition | CLCN4MYT | GYS1PSSM1 | DDB2LSCC | OAS1WNVR | ST14_NFSYN | ST14NFS | ACAN_D1 |
| Androgen | | | | | | | |
| Insensitivity (AI) | | | | | | | |
| Equine Metabolic | | | | | | | |
| Syndrome - Risk | | | | | | | |
| (EMS) | | | | | | | |
| Equine Recurrent | | | | | | | |
| Uveitis - Risk | | | | | | | |
| (ERU) | | | | | | | |
| Hyperkalemic | | | | | | | |
| Partial Paralysis | | | | | | | |
| (HYPP) | | | | | | | |
| Impaired | | | | | | | |
| Acrosomal | | | | | | | |
| Reaction (IAR) | | | | | | | |
| Laminitis Risk | | | | | | | |
| (LAM) | | | | | | | |
| Lordosis (affected) | | | | | | | |
| Lordosis (carrier) | | | | | | | |
| Malignant | | | | | | | |
| Hyper-thermia | | | | | | | |
| (MH) | | | | | | | |
| Myotonia (MYT) | X/n | | | | | | |
| Polysaccharide | | X/n | | | | | |
| Storage Myopathy | | | | | | | |
| (type 1; PSSM) | | | | | | | |
| Squamous Cell | | | X | | | | |
| Carcinoma | | | | | | | |
| (SCC) - Risk | | | | | | | |
| West Nile | | | | X | | | |
| Virus (WNV) | | | | | | | |
| Susceptibility | | | | | | | |
| Naked Foal | | | | | X/X | X/X | |
| Syndrome (NFS) | | | | | | | |
| Dwarfism (affected) | | | | | | | X/X |
| Dwarfism (carrier) | | | | | | | X/n |

| Disease or | | | | | |
|---|---|---|---|---|---|
| non-disease | | | | | |
| condition | ACAN_D2 | ACAN_D3 | ACAN_D4 | ACAN_D5 | Description |
| Androgen | | | | | Horses with AI may appear to be |
| Insensitivity (AI) | | | | | females however may be genetically |
| | | | | | male making them unable to reproduce. |
| Equine Metabolic | | | | | EMS variant - horse may have |
| Syndrome - Risk | | | | | increased susceptibility to EMS |
| (EMS) | | | | | over average horse. |
| Equine Recurrent | | | | | ERU risk variant - horse may have |
| Uveitis - Risk | | | | | increased susceptibility to ERU |
| (ERU) | | | | | over average horse. |
| Hyperkalemic | | | | | HYPP variant - symptoms for |
| Partial Paralysis | | | | | HYPP may be present along with |
| (HYPP) | | | | | greater than average muscle |
| | | | | | development at an early age. |
| Impaired | | | | | IAR variants - only shown to |
| Acrosomal | | | | | affect Thoroughbred stallions |
| Reaction (IAR) | | | | | (IAR or subfertility) |
| Laminitis Risk | | | | | LAM risk variant - Horse may |
| (LAM) | | | | | have increased risk of |
| | | | | | EMS-related Laminitis over |
| | | | | | average horse. |
| Lordosis (affected) | | | | | Lordosis variants - 80% of horses |
| | | | | | with this genotype will display |
| | | | | | lordosis phenotype (Swaybacked). |
| Lordosis (carrier) | | | | | Lordosis variants - carrier status |
| | | | | | for lordosis (swayback seen in |
| | | | | | North American |
| | | | | | Saddlebred) - probability of |
| | | | | | producing swaybacked foal with |
| | | | | | another carrier is approximately |
| | | | | | 3% risk. |
| Malignant | | | | | MH variant - horse may experience |
| Hyper-thermia | | | | | Malignant Hyperthermia if unduly |
| (MH) | | | | | stressed or anesthetized, please |
| | | | | | consult your veterinarian. |
| Myotonia (MYT) | | | | | MYT variant - horse may be at |
| | | | | | increased risk for MYT - increased |
| | | | | | muscle stiffness or sudden muscle |
| | | | | | relaxation/collapse (“Fainting Goat |
| | | | | | Syndrome”). |
| Polysaccharide | | | | | PSSM Type 1 variant - horse may |
| Storage Myopathy | | | | | experience symptoms of |
| (type 1; PSSM) | | | | | “tying up” due to specific diet and |
| | | | | | exercise/work regimen, please |
| | | | | | consult with your veterinarian. |
| Squamous Cell | | | | | SCC Risk variant - horse may |
| Carcinoma | | | | | have increased risk for Squamous |
| (SCC) - Risk | | | | | Cell Carcinoma of the eye over |
| | | | | | average horse. |
| West Nile | | | | | WNV Risk variant - horse may |
| Virus (WNV) | | | | | suffer greater, longer or higher risk |
| Susceptibility | | | | | symptoms if he/she contracts West |
| | | | | | Nile Virus (*NOT a test for the |
| | | | | | presence of WNV). |
| Naked Foal | | | | | NFS variant - horse may be born |
| Syndrome (NFS) | | | | | without coat, mane, tail, dry skin. |
| | | | | | NFS/NFS foals are at high risk for |
| | | | | | death. |
| Dwarfism (affected) | X/X | X/X | X/X | X/X | Dwarfism variants - may result in |
| | | | | | stunted growth, abnormalities in |
| | | | | | bone and tissue, health risks, |
| | | | | | failed pregnancies and possible |
| | | | | | foal death |
| Dwarfism (carrier) | X/n | X/n | X/n | X/n | Dwarfism variant - carrier for |
| | | | | | Dwarfism, do not breed to another |
| | | | | | carrier to avoid affected foal |

TABLE 9
Referential table for behavioral/ability genotypes in horses

| Behavioral | | DMRT3 | MSTN | Myo- | |
|---|---|---|---|---|---|
| trait/ability | DRD4CV | Gait | DIST | statin | Description |
| Curious & Vigilant | X/n | | | | One Curiosity and one Vigilance variant; horse is likely both curious and vigilant. |
| Endurance | | | n/n | n/n | Endurance type myostatin; horse may excel at longer distance travel versus sprint |
| | | | | | type activity. |
| DMRT3 “Gait” Carrier | | X/n | | | One DMRT3 or “gaited” variant; may display a wide variation in locomotion, partial |
| (One Variant) | | | | | “gaiting” and possible difficulty with lead change, tempi changes, canter, or gait |
| | | | | | transitions. |
| DMRT3 “Gaited” | | X/X | | | Two DMRT3 or “gaited” variants; may display “gaiting”, 4 beat or possible loss of |
| (Two Variants) | | | | | canter). |
| Mid-Distance | | | X/n | X/n | Mid-distance type MSTN; horse may have multi-distance capabilities including sprint |
| | | | | | and endurance. |
| More Curious | X/X | | | | Two Curiosity variants; horse may be more curious than vigilant. |
| More Vigilant | n/n | | | | Two Vigilance variants; horse may be more vigilant than curious. |
| Non-Gaited | | n/n | | | No DMRT3 variants; likely non-gaited. |
| Sprint | | | X/X | X/X | Two Sprint type variants; horse may accel at short distance, quick bursts of speed |
| | | | | | over endurance type activity |

[0156] Tables 2-9 above contain the letters “X” and “n” in columns corresponding to individual variant copy number requirements to designate the genotype or phenotype of the horse. For example, “X/X” corresponds to an animal that is homozygous with respect to a particular variant. “X/n” corresponds to an animal that is heterozygous with respect to a particular variant. The label “n/n” corresponds to an animal that is either negative for the variant in question or the variant is irrelevant to the particular trait. The label “X” corresponds to a genotype that is either homozygous or heterozygous with respect to a particular variant. Thus, in a particular example, a horse having an “X/n” genotype for a MSTN gene variant would be heterozygous (i.e., MSTN/mstn) for a particular MSTN gene variant.

[0157] In a particular example, a user wishing to identify or produce a horse having a Dunskin Splash coat color/modification will require that the horse expresses a combination of at least one Black (E), Agouti (A), Cream (CR), Dun (D), and one or more of the splash genes (e.g., Splashed White 1, 2, 3, 4, 5, or 6). Therefore, the user may employ the database system of the disclosure by providing Dunkin Splash as a desired coat color/modification via the computer-implemented user interface. The user interface will then relay the preferred phenotype to the database system, which, using its search and comparison engines, will identify existing animals expressing the aforementioned genes or identify one or more breeding pairs capable of producing an offspring animal expressing the aforementioned genes to produce the Dunkin Splash coat phenotype.

[0158] In another example, a user wishing to identify or produce a horse having a Bay Overo coat color/modification will require that the horse expresses a combination of at least one copy of Black (E), Agouti (A), and one Lethal White Overo (LWO or “O”), which is occasionally not visible on the horse. However, a horse that is homozygous for LWO (i.e., LWO/LWO) is likely to die shortly after birth. Therefore, the database system of the disclosure can use this information to caution the user than the desired Bay Overo coat may produce a high probability of a fatal outcome if the identified or produced horse is an LWO homozygote. As such, the methods and systems described herein may prevent or reduce the likelihood of undesirable breeding outcomes for users wishing to produce an animal having one or more predetermined traits.

[0159] Inaccuracies can occur in the collection and reporting of information from secondary sources, sometimes due to misrepresentations of the animal's traits, habits, predisposition, or performance. For example, in order to increase the likelihood of a sale, an animal seller may misrepresent information about the animal to a buyer to inflate its value. Relatedly, an animal owner may assess the animal as being of a particular breed or as having a particular set of predispositions based on inaccurate pedigree information. To address this issue, the database can include an input for information from secondary sources, such as information obtained from, e.g., someone knowledgeable about the animal, which may be used to correct or produce more accurate determinations of relevant traits. The secondary source information can be combined with other data in the database such as a genetic profile of the animal, clinical assays of biological tissue obtained from the animal, and/or diagnostic tests performed in the animal to produce an overall characterization of the animal. In some cases, heuristic rules may be used to generate data based on measured (e.g., genetic/clinical/diagnostic data), rather than self-reported traits of the animal. Heuristic rules are defined as rules which relate measurable (or accurately measurable) traits to less measurable or less reliable traits such as those from self-reported data. As such, one or more heuristic rules, typically based on research which statistically links a variety of parameters related to one or more traits of interest, can be applied to the data representing genetic and non-genetic information about the animal to derive more accurate assessment of the probability of obtaining an animal having one or more predetermined traits.

[0160] According to the present disclosure, the database system described herein may further include unique database subsystems containing information about each of, for example, user profiles, user farm profiles, user settings, animal profiles, veterinary diagnostic tests, user payment information, and user selection parameters pertaining to one or more predetermined traits of the animal.

[0161] Although represented as a system and search engines, the system and engines can be considered subsystems of a larger database system, and as such referred to as subsystems. Such subsystems may be implemented as sections of code, objects, or classes of objects within a single system, or may be separate hardware and software platforms which are integrated with other subsystems to form the final system. The database system described herein may employ a number of database architectures including, but not limited to flat files, relational databases and object-oriented databases. The various subsystems can be discrete components, configurations of electronic circuits within other circuits, software modules running on computing platforms including classes of objects and object code, or individual commands or lines of code working in conjunction with one or more Central Processing Units (CPUs). A variety of storage units can be used including but not limited to electronic, magnetic, electromagnetic, optical, opto-magnetic and electro-optical storage (e.g., non-transitory storage media).

[0162] The database system may include database subsystems that may be combined into a single database or kept separated. Separate database subsystems may be stored on a single computing device or distributed across a plurality of devices. As such, a memory for storing such datasets, while referred to as a singular memory, may in reality be a distributed memory including a plurality of separate physical or virtual memory locations distributed over a plurality of devices such as over a computer network. Data, datasets, databases, methods and software of the present disclosure can be embodied on a computer-readable media (medium), computer-readable memory (including computer readable memory devices), and program storage devices readable by a machine.

[0163] The computer-implemented systems and databases disclosed herein can be accessed remotely as part of a web-based health analysis and diagnostics platform in which the users are able to submit biological samples of one or more non-human animals to obtain services such as pedigree analysis, health assessment, and facilitation of breeding strategies. In these scenarios, the database disclosed herein can be used to determine such parameters as the likelihood that the animal will develop or has a particular disease or have an injury related to likelihood of disease development, and or the particular breed or combination of breeds of the animal. The user may submit the genetic sample of the non-human animal(s) by, e.g., mailing the sample to an analysis center, where genetic and, optionally, epigenetic testing is performed, and the data stored in an appropriate database. A veterinarian, user, or someone familiar with the animal may report other data from which non-genetic information is obtained and stored. Using the methods and systems disclosed herein, an assessment of the animal can be developed and presented via the user interface described herein. These assessments may relate to physical and/or behavioral characteristics or predispositions of the animal.

### Use of a Database System to Produce a Genetically Modified Animal Having One or More Predetermined Traits

[0164] A non-human animal with one or more predetermined traits may be produced using the systems and methods described herein, including by genetically modifying the animal to produce a transgenic non-human animal. For example, for a variety reasons, a user may not be successful in the production of an offspring animal having one or more traits from a breeding pair identified using the database system as being capable of producing the offspring animal having one or more predetermined traits. In such a case, a user may elect to further genetically modify the offspring animal (e.g., during prenatal development or after birth) to increase the likelihood of the offspring animal having the one or more predetermined traits. Alternatively, a user, using the database system, may be unsuccessful in the identification of a breeding pair (from among the entries in the database) that is capable of producing a desired offspring animal having one or more predetermined traits (e.g., some, but not all, of the desired traits may be result by breeding the selected parental animals) In such a scenario, a user may decide to genetically modify at least one of the animals in the breeding pair so as to increase the likelihood that the breeding pair will produce an offspring animal having all (or most of) the one or more predetermined traits. In another example, a user may be successful in producing an offspring animal having some, but not all, desired traits from a breeding pair identified using the disclosed database system. To ensure the expression of all desired traits in the offspring animal, the user may genetically modify the offspring animal to increase the likelihood of the offspring animal expressing all of the predetermined traits desired by the user. In yet another example, a user may be successful in producing an offspring animal having partial, but not complete expression of a particular desired trait, which results in, e.g., a mixed phenotype. To remedy the incomplete expression of the desired trait in the offspring animal, the user may genetically modify the offspring animal to increase (e.g., by 5%, 10%, 15%, 20%, 30%, 40%, 50%, 60%, 70%, 80%, 90%, 100% or more) the expression of the incompletely expressed trait. Methods for genetic modification of non-human animals is discussed in further detail below.

[0165] Genetically modifying the offspring animal may include, e.g., modifying at least 1 (e.g., at least 1, 2, 3, 4, 5, 6, 7, 8, 9, 10, or more) genes in the offspring animal to produce a desired genotype or phenotype. Genetic modification may be achieved in the offspring animal by introduction of heterologous polynucleotides encoding a transgene of interest (e.g., wild-type variants of genes disclosed in Table 10, among others) into the cells of the non-human animal by editing one or more endogenous genes in the non-human animal, as is described in detail below. Genetic modification may be performed in an animal in which, for example, an endogenous gene corresponding to the transgene is lacking or the endogenous gene corresponding to the transgene produces an undesirable trait.

[0166] A. Delivery of a Heterologous Gene to Animal Cells

[0167] The present disclosure provides methods for producing transgenic non-human animals (e.g., horse, cattle, sheep, dog, cat, camel, pig, goat, alpaca, donkey, llama, red fox, mouse, rat, ferret, non-human primate, rabbit, gerbil, hamster, chinchilla, or guinea pig) having one or more predetermined traits by introducing a heterologous polynucleotide encoding a transgene that increases the probability of producing one or more desirable traits in the animal. Transgenic animals may be produced by artificially incorporating a heterologous transgene of interest into one or more cells (e.g., incorporation into the genome of the one or more cells), or the germline, of the animal, a parent or ancestor of the animal, the animal at an early developmental stage (e.g., embryonic stage, such as a single-cell stage), or the animal after birth. Introduction of an exogenous transgene to the animal has the intended effect of increasing the probability of producing one or more predetermined traits in the animal or offspring of the animal.

[0168] Several methods are available by which a transgene can be introduced into an animal so as to be chromosomally incorporated into the animal genome. Techniques that can be used to introduce a heterologous transgene an animal cell are well known in the art. For example, electroporation can be used to permeabilize target cells by the application of an electrostatic potential to the cell of interest. Target cells, such as mammalian or insect cells, subjected to an external electric field in this manner are subsequently predisposed to the uptake of exogenous nucleic acids. Electroporation of mammalian cells is described in detail, e.g., in Chu et al., Nucleic Acids Research 15:1311 (1987), the disclosure of which is incorporated herein by reference. A similar technique, Nucleofection™, utilizes an applied electric field in order to stimulate the uptake of exogenous polynucleotides into the nucleus of a eukaryotic cell. Nucleofection™ and protocols useful for performing this technique are described in detail, e.g., in Distler et al., Experimental Dermatology 14:315 (2005), as well as in US 2010/0317114, the disclosures of each of which are incorporated herein by reference.

[0169] Additional techniques useful for the transfection of target cells are the squeeze-poration methodology. This technique induces the rapid mechanical deformation of cells in order to stimulate the uptake of exogenous DNA through membranous pores that form in response to the applied stress. This technology is advantageous in that a vector is not required for delivery of nucleic acids into a cell, such as a human target cell. Squeeze-poration is described in detail, e.g., in Sharei et al., Journal of Visualized Experiments 81:e50980 (2013), the disclosure of which is incorporated herein by reference.

[0170] Lipofection represents another technique useful for transfection of target cells. This method involves the loading of nucleic acids into a liposome, which often presents cationic functional groups, such as quaternary or protonated amines, towards the liposome exterior. This promotes electrostatic interactions between the liposome and a cell due to the anionic nature of the cell membrane, which ultimately leads to uptake of the exogenous nucleic acids, for example, by direct fusion of the liposome with the cell membrane or by endocytosis of the complex. Lipofection is described in detail, for example, in U.S. Pat. No. 7,442,386, the disclosure of which is incorporated herein by reference. Similar techniques that exploit ionic interactions with the cell membrane to provoke the uptake of foreign nucleic acids are contacting a cell with a cationic polymer-nucleic acid complex. Exemplary cationic molecules that associate with polynucleotides so as to impart a positive charge favorable for interaction with the cell membrane are activated dendrimers (described, e.g., in Dennig, Topics in Current Chemistry 228:227 (2003), the disclosure of which is incorporated herein by reference) polyethylenimine, and diethylaminoethyl (DEAE)-dextran, the use of which as a transfection agent is described in detail, for example, in Gulick et al., Current Protocols in Molecular Biology 40:1:9.2:9.2.1 (1997), the disclosure of which is incorporated herein by reference. Magnetic beads are another tool that can be used to transfect target cells in a mild and efficient manner, as this methodology utilizes an applied magnetic field in order to direct the uptake of nucleic acids. This technology is described in detail, for example, in US 2010/0227406, the disclosure of which is incorporated herein by reference.

[0171] Another useful tool for inducing the uptake of exogenous nucleic acids by target cells is laserfection, also called optical transfection, a technique that involves exposing a cell to electromagnetic radiation of a particular wavelength in order to gently permeabilize the cells and allow polynucleotides to penetrate the cell membrane. The bioactivity of this technique is similar to, and in some cases found superior to, electroporation.

[0172] Impalefection is another technique that can be used to deliver genetic material to target cells. It relies on the use of nanomaterials, such as carbon nanofibers, carbon nanotubes, and nanowires. Needle-like nanostructures are synthesized perpendicular to the surface of a substrate. DNA including the gene, intended for intracellular delivery, is attached to the nanostructure surface. A chip with arrays of these needles is then pressed against cells or tissue. Cells that are impaled by nanostructures can express the delivered gene(s). An example of this technique is described in Shalek et al., PNAS 107: 1870 (2010), the disclosure of which is incorporated herein by reference.

[0173] Magnetofection can also be used to deliver nucleic acids to target cells. The magnetofection principle is to associate nucleic acids with cationic magnetic nanoparticles. The magnetic nanoparticles are made of iron oxide, which is fully biodegradable, and coated with specific cationic proprietary molecules varying upon the applications. Their association with the gene vectors (DNA, siRNA, viral vector, etc.) is achieved by salt-induced colloidal aggregation and electrostatic interaction. The magnetic particles are then concentrated on the target cells by the influence of an external magnetic field generated by magnets. This technique is described in detail in Scherer et al., Gene Therapy 9:102 (2002), the disclosure of which is incorporated herein by reference.

[0174] Another useful tool for inducing the uptake of exogenous nucleic acids by target cells is sonoporation, a technique that involves the use of sound (typically ultrasonic frequencies) for modifying the permeability of the cell plasma membrane permeabilize the cells and allow polynucleotides to penetrate the cell membrane. This technique is described in detail, e.g., in Rhodes et al., Methods in Cell Biology 82:309 (2007), the disclosure of which is incorporated herein by reference.

[0175] B. Gene Editing

[0176] The present disclosure also provides methods for producing transgenic non-human animals (e.g., horse, cow, sheep, dog, camel, among others) having one or more predetermined traits by using targeted gene editing methods for modifying chromosomal DNA of the animal. For example, the disclosed methods and systems may be used for the purpose of producing a transgenic non-human animal having one or more predetermined traits by genetically modifying the non-human offspring animal. Genetic modification may be performed on one or more (e.g., 1, 2, 3, 4, 5, 6, 7, 8, 9, 10, or more) genes, given that the genes contribute to or are determinant of the phenotypic expression of the one or more predetermined traits of interest. Gene editing may be performed, e.g., to modify an endogenous gene in the non-human animal. Without wishing to be bound by theory, editing may be performed on a particular endogenous gene if the gene contains a deleterious polymorphism (e.g., SNP) or a genetic mutation (insertion, deletion (e.g., knockout), translocation, inversion, single point mutation, or other mutation) by modifying, deleting, or replacing at least one nucleotide of a DNA or an RNA encoding the endogenous gene in the non-human animal. Gene modifications may be carried out by, e.g., inserting a donor polynucleotide (such as, e.g., donor polynucleotide including a segment of the endogenous gene that lacks the polymorphism or mutation) into a region of the endogenous gene in the non-human animal. Genetic modification may also be performed by, e.g., introducing into the non-human animal (e.g., into the genome of the non-human animal) a polynucleotide encoding one or more copies of a wild-type variant of the endogenous gene. Alternatively, gene editing of an endogenous gene may include modulating (e.g., increasing or decreasing) expression of an endogenous gene in the non-human animal.

[0177] Methods for producing a transgenic animal described herein may include the use of a gene editing system. For example, the gene editing system may introduce an alteration (e.g., insertion, deletion (e.g., knockout), translocation, inversion, single point mutation, or other mutation) in a gene in the animal. Exemplary gene editing systems include the zinc finger nucleases (ZFNs), Transcription Activator-Like Effector-based Nucleases (TALEN), and the clustered regularly interspaced short palindromic repeat (CRISPR) system. ZFNs, TALENs, and CRISPR-based methods are described, e.g., in Gaj et al., Trends Biotechnol. 31(7):397-405, 2013.

[0178] In a typical CRISPR/Cas system, an endonuclease is directed to a target nucleotide sequence (e.g., a site in the genome that is to be sequence-edited) by sequence-specific, non-coding guide RNAs that target single- or double-stranded DNA sequences. Three classes (I-III) of CRISPR systems have been identified. The class II CRISPR systems use a single Cas endonuclease (rather than multiple Cas proteins). One class II CRISPR system includes a type II Cas endonuclease such as Cas9, a CRISPR RNA (crRNA), and a trans-activating crRNA (tracrRNA). The crRNA contains a guide RNA, i.e., typically an about 20-nucleotide RNA sequence that corresponds to a target DNA sequence. The crRNA also contains a region that binds to the tracrRNA to form a partially double-stranded structure which is cleaved by RNase III, resulting in a crRNA/tracrRNA hybrid. The RNAs serve as guides to direct Cas proteins to silence specific DNA/RNA sequences, depending on the spacer sequence. See, e.g., Horvath et al., Science 327:167-170, 2010; Makarova et al., Biology Direct 1:7, 2006; Pennisi, Science 341:833-836, 2013. The target DNA sequence must generally be adjacent to a protospacer adjacent motif (PAM) that is specific for a given Cas endonuclease; however, PAM sequences appear throughout a given genome. CRISPR endonucleases identified from various prokaryotic species have unique PAM sequence requirements. Some endonucleases, e.g., Cas9 endonucleases, are associated with G-rich PAM sites and perform blunt-end cleaving of the target DNA at a location 3 nucleotides upstream from (5′ from) the PAM site. Another class II CRISPR system includes the type V endonuclease Cpf1, which is smaller than Cas9; examples include AsCpf1 (from Acidaminococcus sp.) and LbCpf1 (from Lachnospiraceae sp.). Cpf1-associated CRISPR arrays are processed into mature crRNAs without the requirement of a tracrRNA; stated differently, a Cpf1 system requires only the Cpf1 nuclease and a crRNA to cleave the target DNA sequence. Cpf1 endonucleases, are associated with T-rich PAM sites. Cpf1 can also recognize a 5′-CTA PAM motif. Cpf1 cleaves the target DNA by introducing an offset or staggered double-strand break with a 4- or 5-nucleotide 5′ overhang, for example, cleaving a target DNA with a 5-nucleotide offset or staggered cut located 18 nucleotides downstream from (3′ from) from the PAM site on the coding strand and 23 nucleotides downstream from the PAM site on the complimentary strand; the 5-nucleotide overhang that results from such offset cleavage allows more precise genome editing by DNA insertion by homologous recombination than by insertion at blunt-end cleaved DNA. See, e.g., Zetsche et al., Cell 163:759-771, 2015.

[0179] For the purposes of gene editing, CRISPR arrays can be designed to contain one or multiple guide RNA sequences corresponding to a desired target DNA sequence; see, for example, Cong et al., Science 339:819-823, 2013; and Ran et al., Nature Protocols 8:2281-2308, 2013. At least about 16 or 17 nucleotides of gRNA sequence are required by Cas9 for DNA cleavage to occur; for Cpf1 at least about 16 nucleotides of gRNA sequence is needed to achieve detectable DNA cleavage. In practice, guide RNA sequences are generally designed to have a length of between 17-24 nucleotides (e.g., 19, 20, or 21 nucleotides) and complementarity to the targeted gene or nucleic acid sequence. Custom gRNA generators and algorithms are available commercially for use in the design of effective guide RNAs. Gene editing has also been achieved using a chimeric single guide RNA (sgRNA), an engineered (synthetic) single RNA molecule that mimics a naturally occurring crRNA-tracrRNA complex and contains both a tracrRNA (for binding the nuclease) and at least one crRNA (to guide the nuclease to the sequence targeted for editing). Chemically modified sgRNAs have also been demonstrated to be effective in genome editing; see, for example, Hendel et al., Nature Biotechnol. 985-991, 2015. In some instances, the heterologous animal-modifying agent includes a ribonucleoprotein complex (RNP) including one or more RNA molecules, e.g., a gRNA or a sgRNA, and one or more RNA-binding proteins, e.g., an endonuclease, e.g., a Cas endonuclease (e.g., a Cas9 endonuclease).

[0180] Whereas wild-type Cas9 generates double-strand breaks (DSBs) at specific DNA sequences targeted by a gRNA, a number of CRISPR endonucleases having modified functionalities are available, for example: a nickase version of Cas9 generates only a single-strand break; a catalytically inactive Cas9 (dCas9) does not cut the target DNA but interferes with transcription by steric hindrance. dCas9 can further be fused with an effector to repress (CRISPRi) or activate (CRISPRa) expression of a target gene. For example, Cas9 can be fused to a transcriptional repressor (e.g., a KRAB domain) or a transcriptional activator (e.g., a dCas9—VP64 fusion). A catalytically inactive Cas9 (dCas9) fused to FokI nuclease (dCas9-FokI) can be used to generate DSBs at target sequences homologous to two gRNAs. See, e.g., the numerous CRISPR/Cas9 plasmids disclosed in and publicly available from the Addgene repository (Addgene, 75 Sidney St., Suite 550A, Cambridge, MA 02139; addgene.org/crispr/). A double nickase Cas9 that introduces two separate double-strand breaks, each directed by a separate guide RNA, is described as achieving more accurate genome editing by Ran et al., Cell 154:1380-1389, 2013.

[0181] CRISPR technology for editing the genes of eukaryotes is disclosed in US Patent Application Publications US 2016/0138008 A1 and US 2015/0344912 A1, and in U.S. Pat. Nos. 8,697,359, 8,771,945, 8,945,839, 8,999,641, 8,993,233, 8,895,308, 8,865,406, 8,889,418, 8,871,445, 8,889,356, 8,932,814, 8,795,965, and 8,906,616. Cpf1 endonuclease and corresponding guide RNAs and PAM sites are disclosed in US Patent Application Publication 2016/0208243 A1.

[0182] The desired genome modification may require homologous recombination, wherein one or more double-stranded DNA breaks in the target nucleotide sequence is generated by the RNA-guided nuclease and guide RNA(s), followed by repair of the break(s) using a homologous recombination mechanism (homology-directed repair). In such instances, a donor template that encodes the desired nucleotide sequence to be inserted or knocked-in at the double-stranded break is provided to the cell or subject; examples of suitable templates include single-stranded DNA templates and double-stranded DNA templates (e.g., linked to the polypeptide described herein). In general, a donor template encoding a nucleotide change over a region of less than about 50 nucleotides is provided in the form of single-stranded DNA; larger donor templates (e.g., more than 100 nucleotides) are often provided as double-stranded DNA plasmids. The donor template may be provided to the cell or animal in a quantity that is sufficient to achieve the desired homology-directed repair but that does not persist in the cell or animal after a given period of time (e.g., after one or more cell division cycles). The donor template may include a core nucleotide sequence that differs from the target nucleotide sequence (e.g., a homologous endogenous genomic region) by at least 1, at least 5, at least 10, at least 20, at least 30, at least 40, at least 50, or more nucleotides. This core sequence is flanked by homology arms or regions of high sequence identity with the targeted nucleotide sequence; in some instances, the regions of high identity include at least 10, at least 50, at least 100, at least 150, at least 200, at least 300, at least 400, at least 500, at least 600, at least 750, or at least 1000 nucleotides on each side of the core sequence. In some instances where the donor template is in the form of a single-stranded DNA, the core sequence is flanked by homology arms including at least 10, at least 20, at least 30, at least 40, at least 50, at least 60, at least 70, at least 80, or at least 100 nucleotides on each side of the core sequence. In instances where the donor template is in the form of a double-stranded DNA, the core sequence is flanked by homology arms including at least 500, at least 600, at least 700, at least 800, at least 900, or at least 1000 nucleotides on each side of the core sequence. Two separate double-strand breaks may be introduced into the cell or animal's target nucleotide sequence with a double nickase Cas9 (see Ran et al., Cell 154:1380-1389, 2013), followed by delivery of the donor template.

[0183] Gene editing methods disclosed herein may involve a guide RNA (gRNA) and a targeted nuclease, e.g., a Cas9, e.g., a wild type Cas9, a nickase Cas9 (e.g., Cas9 D10A), a dead Cas9 (dCas9), eSpCas9, Cpf1, C2C1, or C2C3, or a nucleic acid encoding such a nuclease. The choice of nuclease and gRNA(s) is determined by whether the targeted mutation is a deletion, substitution, or addition of nucleotides, e.g., a deletion, substitution, or addition of nucleotides to a targeted sequence. Fusions of a catalytically inactive endonuclease e.g., a dead Cas9 (dCas9, e.g., D10A; H840A) tethered with all or a portion of (e.g., biologically active portion of) an (one or more) effector domain create chimeric proteins that can be linked to the polypeptide to guide the composition to specific DNA sites by one or more RNA sequences (sgRNA) to modulate activity and/or expression of one or more target nucleic acids sequences. In some instances, the gRNA and the targeted nuclease are provided as a ribonucleoprotein complex (RNP).

[0184] The gene editing system may include a guide RNA (gRNA) for use in a CRISPR system for gene editing. Alternatively, the gene editing system may include a zinc finger nuclease (ZFN), or an mRNA encoding a ZFN, that targets (e.g., cleaves) a nucleic acid sequence (e.g., DNA sequence) of a gene in the animal. In other alternatives, the gene editing system may include a TALEN, or an mRNA encoding a TALEN, that targets (e.g., cleaves) a nucleic acid sequence (e.g., DNA sequence) in a gene in the animal.

[0185] For example, the gRNA can be used in a CRISPR system to engineer an alteration in a gene in the animal. In other examples, the ZFN and/or TALEN can be used to engineer an alteration in a gene in the animal. Exemplary alterations include insertions, deletions (e.g., knockouts), translocations, inversions, single point mutations, or other mutations. The alteration can be introduced in the gene in a cell, e.g., in vitro, ex vivo, or in vivo. The alteration may increase or decrease (e.g., knock-down or knock-out) the level and/or activity of a gene in the animal. In yet another example, the alteration corrects a defect (e.g., a mutation causing a defect), in a gene in the animal.

[0186] In some instances, the CRISPR system is used to edit (e.g., to add or delete a base pair) a target gene in the animal. In other instances, the CRISPR system is used to introduce a premature stop codon, e.g., thereby decreasing the expression of a target gene. In yet other instances, the CRISPR system is used to turn off a target gene in a reversible manner, e.g., similarly to RNA interference. In some instances, the CRISPR system is used to direct Cas to a promoter of a gene, thereby blocking an RNA polymerase sterically.

[0187] A CRISPR system can be generated to edit a gene in the animal, using technology described in, e.g., U.S. Publication No. 20140068797, Cong, Science 339: 819-823, 2013; Tsai, Nature Biotechnol. 32:6 569-576, 2014; U.S. Pat. Nos. 8,871,445; 8,865,406; 8,795,965; 8,771,945; and 8,697,359.

[0188] The CRISPR interference (CRISPRi) technique can be used for transcriptional repression of specific genes in the animal. In CRISPRi, an engineered Cas9 protein (e.g., nuclease-null dCas9, or dCas9 fusion protein, e.g., dCas9—KRAB or dCas9—SID4X fusion) can pair with a sequence specific guide RNA (sgRNA). The Cas9-gRNA complex can block RNA polymerase, thereby interfering with transcription elongation. The complex can also block transcription initiation by interfering with transcription factor binding. The CRISPRi method is specific with minimal off-target effects and is multiplexable, e.g., can simultaneously repress more than one gene (e.g., using multiple gRNAs). Also, the CRISPRi method permits reversible gene repression.

[0189] Alternatively, CRISPR-mediated gene activation (CRISPRa) can be used for transcriptional activation of a gene in the animal. In the CRISPRa technique, dCas9 fusion proteins recruit transcriptional activators. For example, dCas9 can be fused to polypeptides (e.g., activation domains) such as VP16, VP64, p65 activation domain (p65D), RTA, VPR, or SunTag and used with sgRNA (e.g., a single sgRNA or multiple sgRNAs), to activate a gene or genes in the animal. Multiple activators can be recruited by using multiple sgRNAs—this can increase activation efficiency. A variety of activation domains and single or multiple activation domains can be used. In addition to engineering dCas9 to recruit activators, sgRNAs can also be engineered to recruit activators. For example, RNA aptamers can be incorporated into a sgRNA to recruit proteins (e.g., activation domains) such as VP64. In some examples, the synergistic activation mediator (SAM) system can be used for transcriptional activation. In SAM, MS2 aptamers are added to the sgRNA. MS2 recruits the MS2 coat protein (MCP) fused to p65AD and heat shock factor 1 (HSF1).

[0190] The CRISPRi and CRISPRa techniques are described in greater detail, e.g., in Dominguez et al., Nat. Rev. Mol. Cell Biol. 17:5-15, 2016, incorporated herein by reference. In addition, dCas9-mediated epigenetic modifications and simultaneous activation and repression using CRISPR systems, as described in Dominguez et al., can be used to modulate a gene in the animal.

[0191] i. Generation of a Guide RNA for Use in CRISPR-Cas-Based Genetic Modification

[0192] The present disclosure further relates to a method of producing a gRNA for use with a CRISPR-Cas-based gene editing system in conjunction with the methods and systems disclosed herein to produce an offspring animal having one or more predetermined traits. For example, a user of the database system of the disclosure may desire to produce a horse having a specific set of predetermined traits. Upon selecting said traits using the computer-implemented user interface system, the database system of the disclosure may report that the specific set of selected traits is likely to produce a potentially deleterious disease or non-disease condition in the foal (e.g., GBED; see FIG. 1O). The user interface may provide the user with an option to genetically modify the embryo of the foal in order avoid the disease or non-disease condition or to modify any other trait in the animal. Once the user opts to genetically modify the subject foal using the database system, the database system will utilize the genetic information of the foal as it relates to GBED to produce one or more gRNAs specifically targeting the affected region of the target GBE1 gene responsible for GBED. The one or more gRNAs may then be introduced into the embryo of the subject foal using methods described herein to produce a horse having one or more predetermined traits selected by the user and lacking the potentially deleterious risk of having GBED. Similar steps may be applied to achieve a desired phenotype in a non-human animal with regard to other traits disclosed herein.

### Computer-Implemented Graphical User Interface

[0193] The present disclosure features a computer-implemented, remote (e.g., web-based), graphical user interface that allows a user to execute a variety of functions including, but not limited to creating, viewing, and modifying a user profile, a non-human animal (e.g., a horse) profile, and/or a farm profile, configuring user settings, ordering and viewing diagnostic test results (e.g., genetic test results pertaining to one or more predetermined traits), searching for animals (e.g., horses) having one or more predetermined traits, selecting gene pools from which one or more candidate animals of a breeding pair can be selected, selecting one or more predetermined traits of a non-human animal to be produced, bought, or leased, selecting one or more predetermined traits of at least one member of a breeding pair capable of producing a non-human having one or more predetermined traits, viewing and selecting potential breeding pair matches capable of producing an animal having one or more predetermined traits with a high probability (e.g., 6.25%, 12.5%, 25%, 50%, 60%, 70%, 80%, 90%, 95%, 99%, or 100%.), saving, viewing, and selecting among trending presets containing discovered animals matching criteria based on previously selected trait combinations of a non-human animal, selecting one or more traits of a non-human animal that do not occur naturally and which may be achieved through the production of a transgenic non-human animal having those traits, performing ancestry analysis on a biological sample obtained from the non-human animal, providing payment information and making payments pertaining to services rendered by the platform of the disclosure, signing up for membership to the user platform, uploading and downloading data files (e.g., test results, images of user, animal, or farm), among others. The sections that follow describe the various uses and components of the computer-implemented user interface in detail.

### Use of a Computer-Implemented User Interface to Produce an Animal Having a Desired Phenotype

[0194] The computer-implemented user interface may be used to assist a user in producing, procuring, and/or identifying one or more non-human animals having one or more predetermined traits. The interface can be configured to allow a user to interrogate the computer-implemented database system described herein. Interrogation of the database may include selecting one or more predetermined traits of interest for the one or more non-human animals (see FIGS. 1E, 1F, and 1H-1I). The interrogation may further include identifying one or more of the non-human animals catalogued in the database system and generating a probability matrix for each of the one or more non-human animals identified using the database system (see, e.g., FIG. 1K). The probability matrix may include an array of probability values pertaining to the likelihood that the non-human animal has the one or more predetermined traits or the likelihood that the non-human animal, when used as a breeder animal in a breeding pair, will produce an offspring animal having the one or more predetermined traits. The system can then display an overall assessment of each of the non-human animals (e.g., one or more parent or offspring animals) having the one or more predetermined traits (see, e.g., FIG. 1O).

[0195] The user interface can include an option for the user to produce, purchase, or lease one or more of the non-human animals having the one or more predetermined traits, if desired, by, e.g., interrogating the database system of the disclosure to identify one or more non-human animals having the one or more predetermined traits. In the case that a user elects to identify a breeding pair capable of producing an offspring animal having one or more predetermined traits, the user may utilize the user interface to select one or more predetermined traits of at least one parent animal in a breeding pair (e.g., breed and/or discipline; see, e.g., FIG. 1I). A user may additionally utilize the user-interface to select a gene pool from which the one or more of the non-human animals (e.g., one or more of the parent animals in a breeding pair) are obtained (e.g., the user's own animals, animals owned by other users, an animal registry, and/or animals located within a specified geographical area (see, e.g., FIG. 1O)).

### User Input

[0196] A. Custom Selection of One or More Predetermined Traits

[0197] The computer-implemented user interface of the disclosure allows a user to select traits from a vast catalog of physical, behavioral, and genetic traits in order to produce, procure, and/or identify a non-human animal having a particular phenotype, such as a phenotype suitable for a specific discipline of the animal (e.g., any one of the disciplines disclosed herein). For example, the disclosed methods and systems are suitable for producing a non-human offspring animal having one or more predetermined traits. A non-human offspring animal having one or more predetermined traits may be produced by, e.g., interrogating a database system of the disclosure to identify one or more breeding pairs capable of producing a desired offspring animal. Production of the offspring animal may in some instances require genetically modifying the offspring animal or one or more parent animals to increase the likelihood of producing the desired phenotype in the offspring animal. A user may also employ the methods and systems disclosed herein to genetically modify the procured animal to promote the expression of the one or more predetermined traits in the animal.

[0198] The computer-implemented user interface described herein allows a user to select among one or more (e.g., 1, 2, 3, 4, 5, 6, 7, 8, 9, 10, or more) traits desired in a non-human animal from a panel of traits that may include, for example, coat color, coat color modifier, coat texture, coat thickness, facial marking, leg marking, eye color, skin color, mane color, tail color, temperament, speed, gait, and health.

[0199] Non-limiting examples of coat, mane, and/or tail color selections for a desired non-human animal (e.g., a horse) may include amber champagne, amber champagne dun, amber cream, amber dun, amber dun pearl, apricot dun, apricot pearl, agouti, bay, bay cream pearl, bay double cream, bay pearl, black, black bay, black cream pearl, black double cream, black dun, black pearl, black/red, blanket appaloosa, blood bay, blue roan, brindle, brown, buckskin, buttermilk buckskin, champagne, champagne amber pearl, champagne classic pearl, champagne dun, champagne dun pearl, champagne gold pearl, champagne pearl, chesetnut, chestnut cream pearl, chocolate, classic champagne, classic champagne dun, classic cream, classic dun, cream, cream champagne, cream grullo, cream pearl, cremello, dapple grey, dark bay, dark brown, dark chestnut, dominant white, dun, dun bay cream, dun bay double cream, dun black cream, dun black double cream, dun chestnut cream, dun chestnut double cream, dun pearl, dun pearl bay, dun pearl black, dunalino, dunolino, dunskin, dunskin splash, flaxen chestnut, fleabitten grey, frame overo, frosted appaloosa, grey, gold champagne, gold cream, gold dun, gold dun pearl, grey, grullo, half blanket, leopard appaloosa, light grey, liver chestnut, marbled appaloosa, overo, palomino, pearl, perlino, perlino dun, pseudocream classic, red, red chestnut, red dun, red roan, rose grey, sabino, seal brown, silver, silver amber champagne, silver amber dun, silver bay cream, silver bay cream pearl, silver bay double cream, silver black, silver black cream pearl, silver black double cream, silver champagne, silver champagne dun, silver champagne pearl, silver classic champagne, silver classic champagne pearl, silver cream pearl, silver dapple, silver dapple bay, silver dapple buckskin, silver dapple cream grullo, silver dapple dun, silver dapple dunskin, silver dapple grullo, silver dapple pearl, silver dapple perlino, silver dapple perlino dun, silver dun, silver dun bay cream, silver dun bay double cream, silver dun black, silver dun black double cream, silver dun pearl, silver dun pearl bay, silver dun pearl black, silver pearl bay, silver pearl black, silver red, silver smoky cream, skewbald, smoky black, smoky cream, smoky grullo, snowflake appaloosa, sorrel, splashed white, steel grey, sun, tobiano, tovero, tri-color, white, and white spotting.

[0200] According to the methods and systems disclosed herein, the user may choose to create a custom coat color of the non-human animal using a custom color palette that enables the selection of naturally-occurring or non-naturally-occurring coat colors of the animal. For example, the user may select a coat color modifier which may also include notation describing the animal genotype. Specifically, the genotype is represented by two letters or symbols separated by a slash, e.g., Z/n, wherein a dominant allele of a gene is represented by an uppercase letter and the recessive allele is represented by a lowercase letter. The wild-type allele may be represented using a “+” or an “n.” Exemplary coat color modifiers that can be selected by a user include agouti (e.g., NA or A/a), black (e.g., E/E or E/e), champagne (e.g., CH/CH or CH/n), cream (e.g., CR/n), curly coat, D/nd1, D/nd2, dominant white (e.g., W13, W13/W15, W13/W19, W13/W20, W13/W22, W15, W15/W15, W15/W19, W15/W20, W15/W22, W19, W19/W20, W19/W22, W20, W20/W20, W20/W22, W22, W22/W22, W5, W5/W13, W5/W15, W5/W19, W5/W20, W5/W22, W5/W5, W6, W6/W13, W6/W15, W6/W19, W6/W20, or W6/W22), dun (e.g., D/D), grey, leopard spotting complex (e.g., LP/n), overo (e.g., LWO/n), pattern 1, pearl (e.g., prl/n or prl/prl), red (e.g., e/e), sabino, silver (e.g., Z/Z or Z/n), splashed white (e.g., SW1, SW1/SW1, SW1/SW3, SW1/SW5, SW2, SW2/SW2, SW2/SW4, SW3, SW3/SW3, SW3/SW5, SW4, SW4/SW4, SW5, or SW5/SW5), apron, barring on body, barring on shoulder, belly spots (large or small), belly stripe, belted, bend or spots on body, bend or spots on head, birdcatcher spots, black spots, blagdon, blanket with roaning, blanket with spots, blaze, blaze with freckling, body spots, body white, brindle, brow spots, calico, coon/skunk tail, dapples, dilute, dorsal stripe, double dilute, ermine markings, few white hairs on body, fewspot, flaxen mane/tail, flea-bitten, fleshmark, frosted, grullo, heart marking, highlights in mane/tail, lacing pattern, leopard spotted, lightning marks, line back, frosting mane/tail, maximum tobiano, maximum overo, maximum white, maximum white sabino, medicine hat, minimal overo, minimal sabino, minimal tobiano, mixed mane/tail, mottled, no marking, overo, pangare, paw prints, pearl, piebald, pinto markings, rabicano, roan, roaning on body, rose, rump spots, sabino, skewbald, smudge marks, smutty, snip, snowcap, sooty, splash markings, star, stripe, tobiano, tovero, umbilical spots, white head, white mane/tail, white throat latch, white tipped ears, white with fading edges, white with ragged edges, white with smooth edges, wither spot, no markings, solid, white blaze, and white star.

[0201] The user may also select from a panel of facial marking selections desired in the non-human animal (e.g., a horse), including apron face, badger face, bald face, blaze, interrupted stripe, face, snip, star, stripe markings, both eyes amber, both eyes blue, both eyes brown, both eyes green, both eyes tiger, eyebrows, face mask, few white hairs on forehead, left eye amber, left eye blue, left eye brown, left eye green, left eye partial blue, left eye tiger, partial bald face, pigment around eye, right eye amber, right eye blue, right eye brown, right eye green, right eye partial blue, right eye tiger, white around eye, white chin, white jaw, white lip, white nose, and white sclera.

[0202] The user interface further allows a user to make selections pertaining to leg marking in a non-human animal (e.g., a horse), including, but not limited to two back white stockings, two white front socks, two white front stockings, two white hind socks, two white hind stockings, four white socks, four white stockings, back left above hock, back left cannon (¾ stocking), back left coronet, back left ermine spots, back left fetlock, back left half pastern, back left heel, back left partial heel, back left pastern, back left sock, back left stocking, back left stripes, back right above hock, back right cannon, back right coronet, back right ermine spots, back right fetlock, back right half pastern, back right heel, back right partial heel, back right pastern, back right sock, back right stocking, back right stripes, barring on legs, bend or spots on legs, front left above knee, front left cannon, front left coronet, front left ermine spots, front left fetlock, front left half pastern, front left heel, front left partial heel, front left pastern, front left sock, front left stocking, front left stripes, front right above knee, front right cannon, front right coronet, fright right ermine spots, front right fetlock, front right half pastern, front right heel, front right partial heel, front right pastern, front right sock, front right stocking, front right stripes, left front hoof stripes, left front white foot, left hind hoof stripes, left hind white foot, right front hoof stripes, right front white foot, right hind hoof stripes, right hind white foot, and roaning on white socks/stockings.

[0203] Selection of coat texture traits in the non-human animal may be made by a user from a list including smooth, rough, curly, straight, downy, spiky, or brindle. Additionally, coat thickness may also be selected according to the disclosed methods, wherein the coat thickness may be thin, medium, or thick.

[0204] Furthermore, the user interface of the disclosure allows a user to select an eye color, such as, e.g., blue, amber, yellow, orange, hazel, green, or brown, and skin color, such as, e.g., black, brown, pink, yellow, and white, for the desired offspring animal.

[0205] Additionally, the user interface allows a user to select an input for each of coat color, coat color modifier, coat texture, coat thickness, facial marking, eye color, skin color, mane color, tail color, and leg marking traits, such as those listed above, in alone or in combination with each of the above-listed traits. The aforementioned lists of coat colors, facial markings, and leg markings selections are not exhaustive and others known in the art may be incorporated into the database for selection by a user.

[0206] A user may employ the user interface of the disclosure to input a selection for a temperament trait of the desired non-human animal. Non-limiting examples of temperament traits that can be selected by a user include vigilant, curious, curious/vigilant, spooky, non-spooky, hot, cold, and medium. Other temperament traits known in the art could also be catalogued in the database of the present disclosure and interrogated by a user using the user interface of the system described herein.

[0207] Other examples of trait selections that can be made by a user utilizing the user interface include a speed trait for the desired non-human animal. The speed trait may be selected from sprint, mid-distance, and endurance, among others. Other speed trait selections can be catalogued in the database of the present disclosure and interrogated using the user interface of the system described herein.

[0208] The user interface described herein also facilitates the selection of a gait trait of the non-human animal. Accordingly, the user may select a gait trait in the animal from a list that includes, but is not limited to gaited, non-gaited, and gait carrier. Other gait options of the animal may also be incorporated into the database for selection by a user. Selection of a gaited animal may further include selection between the gaits including, but not limited to walk, trot, canter, gallop, pacing, fox trot, racking, country pleasure, Indian shuffle, jogging, paso fino, paso corto, paso largo, paso llano, sobrandando, marcha picada, rack, running walk, stepping pace, singlefoot, tölt, and ravaal.

[0209] According to the present disclosure, a user may desire to select one or more health conditions (e.g., diseases, such as, e.g., genetic diseases) to be avoided when creating a non-animal having the desired phenotype. Therefore, the present disclosure provides for selection of health traits that includes a selection of one or more disease conditions to be excluded or permitted in the animal of interest (e.g., a horse). Disease conditions that may not be desirable in the non-animal include but are not limited to those disclosed in Table 10, below, as well as anhidrosis, degenerative suspensory ligament disease, equine asthma, equine herpes virus risk, epistaxis risk, kissing spines, tendinopathy, wobbler syndrome, and behavioral abnormality (e.g., cribbing, weaving, anxiety, depression, extreme aggression, extreme fearfulness, bucking, striking, biting, self-mutilating, or head shaking). Other disease conditions may be selected to be excluded or permitted in the non-human animal of interest.

TABLE 10
Genetic basis for disease and non-disease conditions in horses

| SEQ ID | | |
|---|---|---|
| NO: | Gene/chromosomal location | Conditions |
| 1 | Androgen receptor (AR) | Androgen insensitivity syndrome |
| 2 | MutY DNA glycosylase (MUTYH) | Cerebellar abiotrophy |
| 3 | Teashirt Zinc finger homeobox 1 (TSHZ1) | Curved ear tips |
| 4 | Aggrecan (ACAN) | Dwarfism |
| 5 | Family with sequence similarity 174 member A | Equine metabolic syndrome and |
| | (FAM174A) | laminitis |
| 6 & 39 | Interleukin 17A (IL17A) and interleukin 17B | Equine recurrent uveitis |
| | (IL17B) | |
| 7-11 | Chemokine (C-X-C motif) ligand 16 (CXCL16) | Equine viral arteritis susceptibility |
| 12 | Solute carrier family 5 member 3 (SLC5A3) | Foal immunodeficiency syndrome |
| 13 | Doublesex and Mab-3 related transcription factor 3 | Gait transition (loss of canter) |
| | (DMRT3) | |
| 14 | Glycogen branching enzyme (GBE1) | Glycogen branching enzyme |
| | | disorder/deficiency |
| 15 | Peptidylprolyl isomerase B (PPIB) | Hereditary equine regional dermal |
| | | asthenia |
| 16 | Serpin family B member 11 (SERPINB11) | Hoof wall separation disease |
| 17 | Beta-1,3-N-acetylgalactosaminyltransferase 2 | Hydrocephalus |
| | (B3GALNT2) | |
| 18 | Sodium voltage-gated channel alpha subunit 4 | Hyperkalemic periodic paralysis |
| | (SCN4A) | |
| 19 | Myosin heavy chain 1 (MYH1) | Immune-mediated myositis |
| 20-22 | FKBP prolyl isomerase 6 (FKBP6) | Impaired acrosomal reaction |
| | | (subfertility) |
| 23 | Laminin subunit gamma 2 (LAMC2) | Junctional epidermolysis bullosa |
| 24 | Myosin 5A (MYO5A) | Lavender foal syndrome |
| 25-28 | Equine chromosome 20 (ECA20) | Lordosis |
| 29 | Ryanodine receptor 1 (RYR1) | Malignant hyperthermia |
| 30 | Chloride voltage-gated channel 4 (CLCN4) | Myotonia |
| 31 | Glycogen synthase 1 (GYS1) | Polysaccharide storage myopathy |
| 32 | Equine chromosome 3 (ECA3) | Recurrent laryngeal neuropathy |
| | | (roaring) |
| 33 | Protein kinase, DNA-activated, catalytic subunit | Severe combined immunodeficiency |
| | (DNAPK) | |
| 34 | Damage specific DNA binding protein 2 (DDB2) | Squamous cell carcinoma |
| 35 | Procollagen-lysine, 2-oxoglutarate 5-dioxygenase | Warmblood fragile foal syndrome |
| | 1 (PLOD1) | |
| 36 | 2′-5′-oligoadenylate synthetase 1 (OAS1) | West Nile Virus susceptibility |

[0210] The user interface disclosed herein also allows for the selection of one or more predetermined traits in one or more parents of a non-human offspring animal. For example, a user may select a filter that limits the selection of one or more of the parents of the offspring animal to exhibit one or more desired traits. Non-limiting examples of parent traits include breed, discipline, and height, among others. The breed of one or more of the parent animals may be selected from a list that includes, for example, Abyssianian/Ethiopian/Oromo/Gala horse, Abyssinian, Akhal Teke, Albanian, Albanian Horse, Alt-Olderburger, Altai Horse, American Cream Draft, American Cream and White, American Curly, American Gaited Mountain Horse, American Gaited Pony, American Paint Horse, American Quarter Horse, American Saddlebred, American Walking Pony, American Warmblood, Andalusian, Andravida, Andravida/Eleia Horse, Anglo European Warmblood, Anglo-Arab, Anglo-Kabarda, Appaloosa, Appendix Quarter Horse, AraAppaloosa, Arabian, Arabian Sporthorse, Ardennes, Ardennes Horse, Argentine Criollo, Asturcon, Asturian, Australian Brumby, Australian Stock Horse, Austrian Warmblood, Azteca, Baise Horse, Balearic, Baluchi, Baluchi Horse, Ban-ei, Banker, Banker Horse, Barb, Barb/Berber Horse, Bashkir, Bashkir Curly, Bashkir Curly Horse, Bashkir Horse, Basotho Pony, Basuto Pony, Belgian, Belgian Draft, Belgian Warmblood, Bhirum Pony, Bhirum/Nigerian Pony, Bhotia Pony, Bhutia Pony, Black Forest, Black Forest Pony, Blue Eyed Horse Association, Boer, Boerperd, Brandenburger, Breton, Breton Horse, British Riding Pony, British Warmblood, Buckskin, Budyonny, Budyonny Horse, Byelorussian Harness, Byelorussian Harness Horse, Camargue, Camargue Horse, Campolina, Canadian Horse, Canadian Sport Horse, Canadian Suffield Mustang, Canadian Warmblood, Carolina Marsh Tacky, Carthusian, Caspian, Caspian Horse, Cayuse, Celtic Warmblood, Cheju, Chicoteague Pony, Chilean Corralero, Chilean Corralero Horse, Chincoteague Pony, Cleveland Bay, Clydesdale, Colorado Ranger Horse, Connemara, Cream Draft, Cremello, Criollo, Crioulo, Curly Horse, Dales Pony, Danish Warmblood, Danube, Danube Delta Horse, Dartmoor Pony, Deliboz, Deliboz/Delibozskaya, Djerma, Dole, Dole Gudbrandsdal/Dolahest/Døle, Dongola, Donkey, Draft, Draft Cross, Draft Horse, Drum Horse, Dutch Draft, Dutch Harness, Dutch Harness Horse, Dutch Warmblood, East Bulgarian, East Friesian, Egyptian, Egyptian Arabian, Eriskay Pony, Estonian Horse/Estonian Native/Estonian Klepper/Eisti Hobune, Estonian Native, Exmoor Pony, Faeroe Pony, Faeroes Pony, Falabella, Falabella Miniature Horse, Fell Pony, Ferghana, Finnhorse, Finnhorse/Finnish Horse, Fjord, Fjord Horse, Fleuve, Florida Cracker, Florida Cracker Horse, Foundation Quarter Horse, Fouta, Foutanke/Fouta, Frederiksborg, Frederiksborg Horse, French Saddlebred, French Saddlebred Horse, French Trotter, Friesian, Friesian Cross, Galiceño, Galician Pony, Galician/Galician Mountain Horse, Gelderlander, Georgian Grande, German Bred, German Riding Pony, Gidran, Gidran/Hungarian Anglo-Arab, Golden American Saddlebred, Gotland, Gotland Pony, Groningen, Groningen Horse, Guangxi, Gypsy Cob, Gypsy Vanner, Hackney, Hackney Horse, Hackney Pony, Haflinger, Half-Arabian, Hanoverian, Hanoverian Warmblood, Hequ, Highland Pony, Hokkaido, Hokkaido Horse, Holsteiner, Holsteiner Warmblood, Hucul, Hucul Pony, Hungarian Warmblood, Iberian Warmblood, Icelandic, Icelandic Horse, lomud, lomud/Yomud/Yamud/Yomut, Irish Cob, Irish Draft, Irish Draught, Irish Draught Horse, Irish Sport Horse, Jeju Horse, Jinzhou, Jutland, Kabarda, Kabarda/Kabardin, Karabair, Karabakh, Kazakh, Kazakh Horse, Kentucky Mountain horse, Kentucky Mountain Saddle Horse, Kerry Bog Pony, KigeR Mustang, Kirdi Pony, Kisber Felver, Kiso, Kiso Horse, Kladbury, Kladbury Horse, Knabstrup, Knabstrupper Warmblood, Kushum, Kushum Horse, Kustanai, Kustanai Horse, Kyrgyz/Kirgiiz Horse, Latvian, Latvian Horse, Lipizzan, Lithuanian Heavy Draft, Lokai, Losino, Losino Horse, Lusitano, M Bayar, Mallorquin, Malopolski, Mangalarga, Mangalarga Marchador, Marsh Tacky, Marwari, Marwari Horse, Wrens Pony, Messara, Messara Horse, Miniature, Miniature Horse, Misaki, Misaki Horse, Missouri Fox Trotter, Missouri Fox Trotting Horse, Miyako, Miyako Pony, Mongolian, Mongolian Horse, Morab, Morgan, Mountain Pleasure Horse, Moyle, Mule, Murgese, Mustang, National Show horse, National Spotted horse, New Forest Pony, New Kirgiz, Newfoundland Pony, Nokota, Nokota Horse, Noma, Noma Horse, Nooitgedacht Pony, Nordland, Nordlandshest/Lyngshest/Nordland Pony, Norfolk Trotter, Noric, North Swedish horse, Northeastern, Ob, Oldenburg, Oldenburg Warmblood, Orlov Trotter, Paint (Overo), Paint (Solid), Paint (Tobiano), Paint (Tovero), Paints (All), Palomino, Pantaneiro, Pantaneiro horse, Paso Fino, Paulista Marchador, Peneia Pony, Percheron, Peruvian Paso, Pindos Pony, Pinia, Pintabian, Pinto, POA, Polish Horse, Ponies (All), Pony, Pony of America, Pottok, Priob/Ob, Przewalski, Przewalski Horse, Pura Raza Espanola (PRE), Pyrenean Tarpan, Qatgani, Qatgani/Qataghani Horse, Quarab, Quarter Horse, Quarter Horse Cross, Quarter Pony, Racking Horse, Rheinland Pfalz Saar, Rhenish Warmblood, Rhinelander horse, Rocky Mountain, Rocky Mountain Horse, Russian Don, Russian Heavy Draft, Russian Trakhener, Russian Trotter, Sanhe, Sanhe Horse, Schleswiger Heavy Draft, Scharzwälder Fuchs, Selle Francais, Shagya, Shagya Arabian, Shetland Pony, Shire, Single-Footing Horse, Skyros Pony, Somali Pony, Sorraia, Soviet Heavy Draft, Spanish Mustang, Spanish-Barb, Spanish-Norman, Spanish-Normal Horse, Sport Horse of Color, Spotted Draft, Spotted Draft Horse, Spotted Saddle, Spotted Saddle Horse, Standardbred, Sudan Country-Bred, Sudan Country-Bred Horse, Suffolk, Suffolk/Suffolk Punch/Suffolk Sorrel, Swedish Warmblood, Taishu/Tsushima, Taishuh, Tarpan, Tawleed, Tennessee Walker, Tennessee Walking Horse/Tennessee Walker, Tersk, Tersk Horse, Thessalian, Thessalian/Thessaly Horse, Thoroughbred, Thoroughbred Cross, Tibetan Pony, Tiger horse, Tokara, Tori, Tori Horse, Trakehner, Ukrainian Riding Horse/Ukrainian Saddle Horse, Ukrainian Saddle, Virginia Highlander, Vlaamperd, Vladimir Heavy Draft, Vyatka, Vyatka Horse, Walkaloosa, Warmblood, Warmblood Cross, Warmblood (All), Warmbloods of Color, Welara Pony, Welsh Cob, Welsh Pony, Weser-Em Pony, West African Barb, Western Sudan Pony, Westphalian, Wielkopolski, Wurttemberger Warmblood, Xilingol, Yakut, Yanqi, Yili, Yonaguni, Zangersheide, Zaniskari Pony, Zhemaichu, and Zorse.

[0211] The user may further select the discipline of one or more of the parents of the non-human offspring animal. Non-limiting examples of discipline include barrel racing, beginner/family, breeding, brood mare, calf roping, companion only, competitive trail competitions, country pleasure, cowboy mounted shooting, cutting, draft, dressage, drill team, driving, endurance riding, English pleasure, equitation, eventing, field hunter, gaited, halter, harness, horsemanship, hunter, hunter under saddle, judged pleasure rides, jumper, lesson horse, longe-line, pleasure driving, pole bending, polo, racing, ranch horse, ranch sorting, reined cow horse, reining, rodeo, roping, showmanship, saddle seat, sidesaddle, steer wrestling, team penning, team roping, team sorting, trail horse, vaulting, Western pleasure, Western pleasure (show), Western riding, working cattle, youth/4-H horse, all around, 4-in hand driving, agility, breed shows, breeding stallion, broodmare, bull fighting, camping, cart, combined driving, cowboy dressage, cowboy racing, doma vaquero, field trials, gymkhana, harness racing, hazing, horse ball, marathon driving, mounted archery, mounted games, mounted patrol, mounted police, native costume, natural horsemanship, nurse mare, pacing, pack horse, parades, park, playday, polocrosse, ranch versatility, recipient broodmare, roadster, rodeo bronc, rodeo pickup horse, rodeo queen horse, roping, saddleseat, search and rescue, show hack, ski joring, steer roping, stock horse, sulky racing, team driving, team roping head horse, team roping heel horse, therapeutic riding, trial class competition, recreational trail riding, turnback horse, Western dressage, working equitation, hunt seat, show jumper, riding, pleasure, and bucking horse, among others. Other breeds, disciplines, and height traits not disclosed herein may be incorporated into the database for selection by a user.

[0212] Moreover, a user may employ the user interface of the disclosure to filter through animals of interest on the basis of specific parameters pertaining to ancestry and genetic relatedness. As is described herein, the user may rely on one or more of shared cM, kinship coefficient, heterozygosity score, inbreeding coefficient (F), breed composition, and identity-by-descent metrics as inclusion or exclusion criteria for the selection of non-animals having a desired degree of inbreeding, genetic relatedness, or a specific breed composition.

[0213] B. Selection of One or More Predetermined Traits from Trending Presets

[0214] As an alternative to selecting among a catalog of multiple distinct traits in order to produce a non-human animal having a desired phenotype (i.e., a custom build), the user may instead select an animal having a predetermined set of traits from a catalog of trending presets that are frequently queried by existing users of the platform of the present disclosure. The trending presets may include animals having one or more predetermined traits (e.g., breed, speed, discipline, gait, temperament, health, and the gene pool from which an animal is obtained) commonly sought out by users of the platform. Exemplary presets may include “Most popular searches for June 2019,” “What are the locals searching for,” “Tobiano is trending now,” “Child friendly,” “Breeding favorites,” “Buy them all,” “Champagne,” “5 Star Show Jumpers,” and “Clean Testing Sale Horses.”

[0215] C. Gene Pool Selection

[0216] The present disclosure allows the user to select the gene pool from which a non-human animal or its parents are obtained (produced, purchased, or procured). As used herein, the term gene pool corresponds to the physical source from which an animal or its parents are obtained, such as the user's own animals, (e.g., “My Horses” and “My Farms” gene pools) and/or other users' animals (e.g., “My Favorites, “Exclusions,” “Location Radius,” “Available for Lease,” “Available for Sale,” “Open to Offers,” “Stallion Standing,” “All Public Profiles,” “Registries.” The “My Horses” gene pool corresponds to animals added by the user onto the user platform, which may be viewed and modified by the user and viewed other users. “My Farms” gene pool represents animals that presently reside on one or more of the user's farms (e.g., an animal farm or a ranch). “My Favorites” gene pool includes animals found on the user platform of the present disclosure that have been designated as favorites by the user. Relatedly, an “Exclusions” gene pool may be included in the user interface of the disclosure as a selection criterion for a desired non-human animal. For example, a user may select identified horses to be categorized under the “Exclusions” group to exclude the selected animals from being identified as an animal having the one or more pre-determined traits. The animals designated as favorites may be the user's own animals or animals owned by other users. The “Location Radius” gene pool corresponds to a gene pool defined by a distance threshold relative to the user's location, which may be custom set by the user. For example, the user may select the selection radius to be no more than 50 km, 500 km, or more than 500 km away from the current location of the user. “Available for Lease” gene pool corresponds to animals owned by other users that are available for lease under terms and conditions set by the animal owner. Relatedly, the “Available for Sale” gene pool corresponds to animals owned by other users that are available for sale under terms and conditions set by the animal owner. The “Open to Offers” gene pool corresponds to animals that an owner, trainer, or veterinarian may be willing to sell, trade, lease, or otherwise consider allowing another interested party to acquire or use the animal. The “Stallion Standing” gene pool corresponds to male animals that are available or offered to breed with other animals from other farms, programs, organizations, registries, or within their own breeding program. “All Public Profiles” gene pool represents all animals that have searchable profiles on the platform of the instant disclosure. “Registries” gene pool corresponds to animals available through a registry (e.g., a horse registry).

[0217] The user interface allows the user to select more one or more gene pool filter to refine the search results. For example, the user may desire to view all animals available for sale within a given radius with respect to the user's location. To this end, the user may select the “Available for Sale” and “Location Radius” gene pool filters, wherein the user may specify the desired radius (e.g., miles or kilometers) within which the user may purchase an animal having the desired traits.

[0218] A. Ancestry Report

[0219] The computer-implemented user interface described herein may also be used to produce an Ancestry Report for one or more non-human animals of interest, as is described herein. The Ancestry Report provides information regarding the breed composition of a particular animal(s) that is based on principal components analysis (PCA) or ADMIXTURE method described in Alexander et al., Genome Res. 19:1655-64 (2009). The user may submit a biological sample obtained from the animal using the user interface system of the disclosure (see FIG. 7), which is subsequently processed to perform various analyses described herein in order to ascertain the breed composition and genetic profile of the animal. Non-limiting examples of analyses include PCA- and ADMIXTURE-based breed decomposition, heterozygosity analysis, inbreeding analysis, and “more like me” analysis, as is described in detail herein. Once the ancestry analysis is completed, the information generated by this analysis can be incorporated into the computer-implemented database system of the disclosure to further characterize a particular non-human animal or the information from the analysis can be used to inform purchasing and breeding decisions.

[0220] E. “Most Like Me” Function

[0221] The present disclosure provides a computer-implemented user interface that can allow a user to identify or produce non-human animals having features similar to an existing non-human animal having a known and defined genotype and phenotype. As is described herein, the user may search the database for animals having a similar or identical profile to a known animal by providing a biological sample obtained from the known animal and using the “Most like me” function in the interface to find one or more matches having similar phenotypic and/or genotypic characteristics. Alternatively, the user may specify a custom set of characteristics in the desired animal that match the known animal, according to the methods described herein, to identify or produce an animal with the desired phenotype.

### Interface Output—Breeding Cross-Match Evaluation and Potential Outcomes

[0222] Following the selection of one or more predetermined traits of a non-human animal (e.g., a horse), the user interface of the disclosure provides a visual output of results that may match the query selected by the user. The results may include, for example, an animal available for sale or lease that matches the phenotype set specified by the user or a breeding cross-match evaluation that provides information about a potential breeding pair match (e.g., a stallion and a mare) capable of producing a non-human offspring animal having one or more predetermined traits with a high probability (e.g., 6.25%, 12.5%, 25%, 50%, 60%, 70%, 80%, 90%, 95%, 99%, or 100%). The breeding cross-match evaluation may include a probability matrix that includes an array of probability values pertaining to the likelihood that a breeding pair produces an offspring animal having one or more predetermined traits. The breeding cross-match evaluation may further provide detailed information about the potential breeding pair match such as, for example, the names, photographs, and location of the stallion and mare as well as means for accessing the animal profile of each stallion and mare, information pertaining to one or more predetermined traits in each of the stallion and mare (e.g., speed, temperament, gait, and genotype), means of contacting the owner of each stallion and mare, as well as information about one or more traits of each stallion and mare.

[0223] The breeding cross-match evaluation further provides a summary report pertaining to the non-human animal that may be produced from the potential breeding pair (e.g., a foal). The summary report may include several different categories of information pertaining to the non-human animal having the desired characteristics set by the user. For example, the summary report may include information about animal (e.g., foal) probabilities, which include but are not limited to a quantitative readout of a probability of producing a particular coat color (e.g., 100% probability of having bay color; 25% of having overo color; and 25% of having sabino color), probability of having or developing a lethal genetic condition (e.g., 25% of having a lethal frame overo genotype), and a probability of having or developing a genetic disorder, such as any one of the genetic disorders listed in Table 10, among others (e.g., 50% of having or developing impaired acrosomal reaction; 50% chance of having or developing lordosis, and 50% chance of having or developing polysaccharide storage myopathy type 1). The summary report may further include information pertaining to one or more behavioral characteristics of the animal, such as, for example, speed (e.g., sprint/endurance), temperament (e.g., curiosity/vigilance), and gait (e.g., gaited/non-gaited). The summary report pertaining to one or more behavioral characteristics may be provided as a visual readout represented on an ordinal scale (e.g., sprint represented on the left end of the scale and endurance represented on the right end of the scale, with intermediate points on the scale corresponding to animals with speed characteristics somewhere between sprint and endurance).

[0224] The summary report may be provided in full or abbreviated form. The abbreviated form may contain information regarding the probability of the offspring animal having a selected speed, temperament, gait, color, disease or condition, and information about the potential breeding pair capable of producing the offspring animal such as names, ages, and images of the potential breeding pair. The full report may include information about the speed, temperament, gait, and genotype of the breeding pair, probabilities of the offspring animal having specific coat color speed, temperament, and gait, as well as probabilities that specific diseases or conditions could afflict the offspring animal. The full report may also provide a graphical representation of a probability matrix containing an array of probability values pertaining to the likelihood of the offspring animal having one or more predetermined traits.

[0225] The output generated by the database system related to non-human animals having a desired phenotype (e.g., Find-A-Horse) or potential breeding pairs capable of producing a non-human animal having the desired phenotype (e.g., Build-A-Horse) may be rank ordered on the basis of several factors, including but not limited to: (1) the magnitude of the probability of the target animal having a desirable trait (e.g., a breeding pair capable of producing a foal having a higher probability of a desired sprint phenotype, such as a CT mid-distance myostatin variant, may be ranked higher in the output results as compared to those breeding pairs/foals that would produce a lower probability of having the phenotype); (2) the magnitude of a probability or the binary presence of an adverse health condition that results from the selection of a desired trait set may be ranked lower as compared to trait sets that produce a lower or absent risk of adverse health conditions (e.g., selection of traits that produces Lethal White Overo or Fragile Foal Syndrome would reduce the rank of a particular breeding pair match); and (3) user's preference for a particular trait over another (e.g., user preference for dunskin coat color over bay coat color). Thus, the rank ordering of the output matches is determined by a combination of priorities set by the user (e.g., one or more predetermined traits) and risk(s) of producing adverse health consequences. This rank ordering of the output matches set by the database system may be overridden or suspended by the user in the case that the user prioritizes a phenotype set that is capable of producing a potentially deleterious or fatal phenotype. For example, the database system may produce an output match that identifies a breeding pair in which both sire and dam carry a risk allele for Fragile Foal Syndrome. The database system, in this case, would issue a warning indicating a high risk of the resulting offspring animal carrying the disease. Nevertheless, the user may still prioritize this match and ignore the high risk of the disease if the other traits possessed by the breeding pair are highly desirable.

### Diagnostic Testing

[0226] The computer-implemented user interface disclosed herein allows for a user to order clinical/veterinary tests (e.g., genetic testing pertaining to pedigree determination, health status, and predispositions towards genetic conditions) to be performed on a biological sample obtained from one or more animals owned by the user (e.g., a horse). The diagnostic testing may also be used to ascertain the ancestries of an animal of interest, e.g., by producing a report containing information on one or more (or all) of the shared cM metric, kinship coefficient, heterozygosity score, inbreeding coefficient, identity-by-descent, or breed composition metrics related to the animal, as is described herein. The user may order a test for a given animal by providing information such as the name of the horse, the type of test desired to be performed, contact information of the user (e.g., telephone number), payment information (e.g., credit card information), as well as any relevant gift card or coupon code information (see FIG. 1R). The user may input personal information to the platform such as, for example, salutation, full name, e-mail (and visibility thereof to other users), telephone number (and visibility thereof to other users), date of birth, user photograph (and visibility thereof to other users), and address (and visibility thereof to other users). The user interface of the disclosure also allows the user to update user settings, such as changing the user password.

### User, Animal, and Farm Profiles

[0227] A. User Profile

[0228] The computer-implemented user interface of the present disclosure allows the user to create a personal profile page which may be viewed and modified by the user and may be viewed by other users of the platform. The user profile may include information about the user including name, address or general location (e.g., city, state, country), and a profile picture, list of animals (e.g., horses) owned by the user as well as visual displays of physical or behavioral trait metrics of the animal, a “Favorites” list including animals designated as Favorites on the user platform, means for adding animals of the user into a “Favorites” list, means for contacting the user (e.g., by e-mail), means for obtaining a submission form related to genetic testing of an animal, and a means for downloading test results (e.g., genetic tests) pertaining to one or more traits of the animal (see, e.g., FIG. 1Q).

[0229] B. Non-Human Animal Profile

[0230] The computer-implemented user interface disclosed herein allows the user to create and to modify a profile page of a non-human animal. The animal profile may include information about the animal including name, breed, age, profile pictures, physical traits including height, colors, and markings, behavioral traits including rideability and temperament, discipline, genetic information about the animal (e.g., presence of particular gene variants in the animal), information pertaining to membership in an animal registry, owner information (e.g., name, address, profile picture), information pertaining to other horses owned by the same owner (e.g., name, breed, age, and picture), order status information pertaining to tests performed on tissue obtained from the animal (e.g., order identification number, date of order, status such as ready or pending), means for downloading test results (e.g., genetic test results) onto the user's device, and means for editing the animal profile (see, e.g., FIG. 1L). The aforementioned list is not exhaustive, and other information and features may be included in the animal profile page.

[0231] C. Farm Profile

[0232] The computer-implemented user interface disclosed herein allows the user to create and modify a profile page of a farm (e.g., an animal farm or ranch). The farm profile may include information about the farm including name, farm type (e.g., horse farm), farm location, farm profile picture or logo, information pertaining to farm members (e.g., member name, picture, number of horses owned), information pertaining to animals situated at the farm (e.g., name, breed, age, picture, and visual displays of physical or behavioral trait metrics of the animal), means for contacting the farm (e.g., by e-mail). These features and information are not exhaustive and other options may for the farm profile page may be included.

### Hardware Implementation

[0233] The user interface described herein can be implemented in digital electronic circuitry, or in computer hardware, firmware, software, or in combinations of them. Apparatus of the disclosure can be implemented in a computer program product tangibly embodied in an information carrier, e.g., in a machine-readable storage device or in a propagated signal, for execution by a programmable processor; and method steps of the disclosure can be performed by a programmable processor executing a program of instructions to perform functions of the disclosure by operating on input data and generating output. The disclosure can be implemented in one or more computer programs that are executable on a programmable system including at least one programmable processor coupled to receive data and instructions from, and to transmit data and instructions to, a data storage system (e.g., a database), at least one input device, and at least one output device. A computer program is a set of instructions that can be used, directly or indirectly, in a computer to perform a certain activity or bring about a certain result. A computer program can be written in any form of programming language, including compiled or interpreted languages, and it can be deployed in any form, including as a stand-alone program or as a module, component, subroutine, or other unit suitable for use in a computing environment.

[0234] Suitable processors for the execution of a program of instructions include, by way of example, both general and special purpose microprocessors, and the sole processor or one of multiple processors of any kind of computer. Generally, a processor will receive instructions and data from a read-only memory or a random-access memory or both. The essential elements of a computer are a processor for executing instructions and one or more memories for storing instructions and data. Generally, a computer will also include, or be operatively coupled to communicate with, one or more mass storage devices for storing data files; such devices include magnetic disks, such as internal hard disks and removable disks; magneto-optical disks; and optical disks. Storage devices suitable for tangibly embodying computer program instructions and data include all forms of non-volatile memory, including by way of example semiconductor memory devices, such as EPROM, EEPROM, and flash memory devices; magnetic disks such as internal hard disks and removable disks; magneto-optical disks; and CD-ROM and DVD-ROM disks. The processor and the memory can be supplemented by, or incorporated in, ASICs (application-specific integrated circuits).

[0235] To provide for interaction with a user, the disclosure can be implemented on a computer having a display device such as a CRT (cathode ray tube), LCD (liquid crystal display), or LED (light-emitting diode) monitor for displaying information to the user and a keyboard and a pointing device such as a mouse or a trackball by which the user can provide input to the computer.

[0236] The disclosure can be implemented in a computer system that includes a back-end component, such as a data server, or that includes a middleware component, such as an application server or an Internet server, or that preferably includes a front-end component, such as a client computer having a user interface (e.g., such as the user interface of the present disclosure) and/or an Internet browser, or any combination of them. The components of the system can be connected by any form or medium of digital data communication such as a communication network. Examples of communication networks include, e.g., a LAN, a WAN, and the computers and networks forming the Internet.

[0237] The computer system can include clients and servers. A client and server are generally remote from each other and typically interact through a network. The relationship of client and server arises by virtue of computer programs running on the respective computers and having a client-server relationship to each other. The computer system may further include portable communications devices such as a mobile telephone that also contains functions such as an Internet browser. Other portable electronic devices, such as laptops or tablet computers may also be used with the present disclosure. It should also be understood that the computer system is not a portable communications device, but may be, e.g., a desktop computer.

### EXAMPLES

[0238] The following examples are put forth so as to provide those of ordinary skill in the art with a description of how the compositions and methods described herein may be used, made, and evaluated, and are intended to be purely exemplary of the disclosure and are not intended to limit the scope of what the inventors regard as their disclosure.

### Example 1: Use of a Computer-Implemented Graphical User Interface for Producing, Procuring, and/or Identifying a Non-Human Animal Having One or More Predetermined Traits

[0239] In order to produce a non-human animal (e.g., a horse, such as, e.g., a foal) having one or more predetermined traits, a computer-implemented user interface is provided to assist a user in selecting traits that are desired in the horse, identifying an existing horse having said pre-determined traits or a breeding pair capable of producing said horse, and producing or procuring said horse. As shown in FIGS. 1A-1U, the user interface can be implemented as a webpage-instantiated graphical user interface on a general purpose computer or hand-held device, allowing a user to create a unique and custom build for a foal or identifying an existing horse having the desired build by selecting the gene pool from which the foal or the breeding pair is obtained, the traits desired in the foal or breeding pair (e.g., speed, temperament, gait, color, color modifier, health; FIGS. 1E, 1F, 1H-1J, and FIG. 5), an option to buy or lease the foal or one or more animals of a breeding pair (FIG. 1D).

[0240] The user interface further allows a user to view profiles of existing horses having a phenotype selected by the user or a horse that can be used as a breeder to produce the foal having a predetermined phenotype. The horse profile provides information pertaining to the horses name, age, breed, sex, genotype, temperament, gait, speed, height, discipline, color, markings, parents, owner, location, as well as other horses owned by the owner (FIG. 1L). Furthermore, the user interface allows a user to view one or more breeding pairs capable of producing a foal having a desired phenotype. The list of breeding pairs also includes a summary of a probability matrix that displays an array of probability values pertaining to the likelihood that the foal will have one or more desired traits (FIG. 1M). Once a user has identified a preferred breeding pair, the user can view information about the breeding pair in more detail, including information about the speed, temperament, gait, genotype, appearance, name, location, and owner of each of the horses in the breeding pair (FIG. 1N). Upon selecting a preferred breeding pair, the user can then view a detailed summary report about a potential foal that could be produced by breeding the breeding pair. The summary report includes a graphical representation of a probability matrix describing the probabilities of the potential foal having one or more desired traits, such as, e.g., a particular coat color, speed, temperament, gait, and/or health issues (FIG. 1O). The user interface also permits the user to identify popular builds queried by other users of the database system based on frequency of searches (FIG. 1P).

[0241] The disclosed user interface further allows a user to create their own user profile (FIG. 1Q), including information about the user, such as, e.g., name, photo, username, location, contact information, and animals owned by the user. The user may also employ the interface to order genetic diagnostic tests for one or more animals owned or leased by the user by providing a sample (e.g., a tissue sample obtained by hair sample or biopsy, blood, serum, plasma, urine, sputum, nail/hoof clippings, cell-free fetal DNA, mitochondria, a gamete (e.g., oocyte or spermatozoon), or an embryo of the offspring animal implanted as part of an in vitro fertilization (IVF) procedure) from the animal by mail (FIG. 1R). The user may then keep track of ordered and performed tests by viewing their status and results on the user profile (FIG. 1S). An example of a Sample Submission Form for genetic testing is provided in FIG. 1T. The results of the genetic testing produced using the database system of the disclosure are described in FIG. 1U.

### Example 2: Use of a Computer-Implemented Database System for Producing a Non-Human Offspring Animal Having One or More Predetermined Traits

[0242] Using the systems and methods disclosed herein, a user (e.g., animal breeder, caretaker, owner, or seller) can interrogate the disclosed computer-implemented database system to produce a non-human offspring animal (horse, cow, sheep, dog, cat, camel, pig, goat, alpaca, donkey, llama, red fox, mouse, rat, ferret, non-human primate, rabbit, gerbil, hamster, chinchilla, or guinea pig) having one or more (e.g., 1, 2, 3, 4, 5, 6, 7, 8, 9, 10, or more) predetermined traits. A computer-implemented graphical user interface (e.g., as is described in Example 1) is used to query and interrogate the database system. As a first step, the user selects one or more predetermined traits (e.g., coat color, coat color modifier, coat texture, coat thickness, facial marking, leg marking, eye color, skin color, mane color, tail color, speed, gait, temperament, or health) that are desired in the offspring animal by way of the user interface. The interface queries the database system to allow the user to identify one or more (1, 2, 3, 4, 5, 6, 7, 8, 9, 10, 12, 14, 16, 18, 20, or more) breeding pairs (e.g., a stallion and a mare) capable of producing the offspring animal. For each identified breeding pair, the database system generates a probability matrix containing an array of probability values pertaining to the likelihood that the offspring animal produced by each of the breeding pairs will have the one or more predetermined traits. As a next step, the user selects, based on the array of probability values of the probability matrix, one or more of the breeding pairs that are likely to produce the offspring animal having the one or more predetermined traits. Subsequent to the selection of one or more candidate breeding pairs, the user can elect to breed one or more of the selected breeding pairs to produce the offspring animal having one or more predetermined traits. In order to detect the presence of the one or more predetermined traits, the user can perform genetic diagnostic testing on the offspring animal during prenatal (e.g., embryonic) development using methods well-known in the art (e.g., Sanger sequencing, Next Generation Sequencing, microarray, AmpliSeq, genomic sequencing, or real-time quantitative polymerase chain reaction (RT-qPCR)) on a sample obtained from the offspring animal (e.g., blood, tissue, hair, cell-free fetal DNA, mitochondria, or a gamete). In the case of a horse, the prenatal genetic testing can be performed during embryonic development (e.g., 3-60 days after conception). In the case that the genetic testing detects the presence of the one or more predetermined traits, the user may continue with the birthing of the offspring animal. Subsequent to the birthing of the offspring animal (e.g., one day to four years after birth), the user can again perform further genetic testing, if desired, to ascertain the presence of the one or more predetermined traits. The user may further confirm the expression of the one or more traits in the offspring animal using non-genetic assessment, such as, e.g., observing the phenotypic expression of the one or more traits; obtaining or having obtained information from someone knowledgeable about the offspring animal pertaining to the one or more predetermined traits; performing or having performed one or more clinical assays on biological tissue obtained from the offspring animal pertaining to the one or more predetermined traits; performing or having performed one or more diagnostic tests on the offspring animal pertaining to the one or more predetermined traits; and/or obtaining scores assigned to the offspring animal during a competition pertaining to the one or more predetermined traits. Upon confirmation of the presence of the one or more predetermined traits in the offspring animal, the user may choose to incorporate information about the offspring animal having the one or more predetermined traits into the database system for use by the user, or a subsequent user, in the production of another offspring animal.

### Example 3: Generation of a Computer-Implemented Database System for Producing, Procuring, or Identifying a Non-Human Animal Having One or More Predetermined Traits

[0243] Using the systems and methods disclosed herein, a user can produce or improve the robustness of a computer-implemented database system by integrating information about one or more predetermined traits from a plurality (e.g., 2, 3, 4, 5, 10, 15, 20, 30, 40, 50, or more) of non-human animals. The provided information may include results of previously performed genetic testing and/or non-genetic assessment of the non-human animal that identify the animal as having the one or more predetermined traits and/or confirm the presence of one or more of the predetermined traits in the animal. The user may catalogue the information about the non-human animal pertaining to the one or more predetermined traits into the database system. The user may register the non-human animal in the database system as a breeder animal. Once the non-human animal is integrated into the database system, a user can interrogate the database system to produce a probability matrix containing an array of probability values pertaining to the likelihood of one or more predetermined traits being expressed in a parent or offspring animal, which may include results associated with the newly input breeding animal as a “parental” animal. In particular, the probability matrix may be produced by a series of conditional genotypic or phenotypic associations that may confer a high or low likelihood of producing the one or more predetermined traits. Such associations are stored within the database system and updated as new associations become known. For example, in a situation in which a breeder desires a horse with blue eyes and white facial markings, the database system of the disclosure may identify an association between blue eyes and facial markings with deafness, thereby producing a probability matrix showing a high probability (e.g., 6.25%, 12.5%, 25%, 50%, 60%, 70%, 80%, 90%, 95%, 99%, or 100%) of the horse having a hearing impairment along with the other two traits. Such an association has been shown, e.g., in horses harboring a heterozygous 63-kb deletion spanning exons 6-9 of the MITF gene (Henkel et al. Animal Genetics 50(2):172-4, 2019). Other associations can be input into the database system and would be identified in the probability matrix output produced based on the input criteria selected by a user.

### Example 4: Use of a Computer-Implemented Database System to Produce a Set of Guidelines for Breeding of a Non-Human Animal Having One or More Predetermined Traits

[0244] Using the systems and methods disclosed herein, a user can obtain a set of guidelines for breeding a non-human animal from the computer-implemented database system. First, the user can query the database system to identify a non-human animal and assess the animal for the presence of one or more predetermined traits. The identification and assessment steps can be performed by generating a probability matrix for the non-human animal using the database system and displaying the probability matrix on a graphical user interface in a user-friendly format. The probability matrix can contain an array of probability values pertaining to the likelihood that the non-human animal has the one or more predetermined traits. The user may then determine, based on the identification and assessment steps above, one or more conditions under which the non-human animal will develop or is at risk of developing a disease or non-disease condition (e.g., one or more disease or non-disease conditions listed in Table 10). Following the risk determination step, the database system may generate for the user a set of guidelines for breeding the non-human animal to avoid manifestation of the disease or non-disease conditions. The set of guidelines may include, e.g., one or more recommendations for mitigating or avoiding the one or more conditions that would result in manifestation of one or more symptoms of the disease or non-disease condition and/or reducing the likelihood of producing an effect in the offspring animal resulting from development of the disease or non-disease condition. Additionally, when the non-human animal is a male or female parent that is part of a breeding pair used for producing an offspring animal, the set of guidelines can provide one or more recommendations that would increase the likelihood of producing an offspring animal having one or more predetermined traits without manifestation of an undesired phenotype or disease condition. The one or more recommendations may include, e.g., guidance pertaining to diet, exercise, regime, discipline, environmental exposure, medication, supplementary treatments, training, conditioning, use, and/or limitation of the non-human animal.

[0245] For example, as is discussed above, horses harboring genetic deletions in the MITF gene locus are known to exhibit striking blue eyes and coat depigmentation (Henkel et al. Animal Genetics 50(2):172-4, 2019). This mutation is also accompanied by deafness. Therefore, upon learning from the probability matrix described above that the desired blue eyes and coat depigmentation carries a high risk of the horse being hearing impaired, the database system may produce a set of guidelines that can be used by the user for training or acclimating a hearing-impaired animal.

[0246] In another example, a horse produced by a user using the methods and systems disclosed herein may have exceptional jumping ability at maturity. The database system of the disclosure may then be used to produce a set of guidelines that can assist the user in the care of an animal selected to be an excellent jumper, such as, e.g., recommendations to feed a low-protein diet to avoid excessive growth and injections of Adequan joint supplement to ensure proper joint lubrication and preparations.

[0247] In another example, a female parent animal may be identified as a potential breeder animal using the disclosed methods and systems to produce a foal having a desirable variant of a bay coat color (e.g., light bay versus dark bay color). It is well-known in the art of animal breeding that specific nutrients are known to be involved in the synthesis of the protein found in hair (e.g., copper, zinc, biotin, fatty acids, and amino acids such as, e.g., methionine). Copper and zinc are known to be essential in the production of melanocytes (i.e., pigment cells) that confer specific coat colors in horses and other animals. Relatedly, high fat diets are known to lubricate the hair of the coat, thereby rendering its appearance as shiny and dark. Thus, if the user prefers to produce an offspring animal having a darker bay coat, the database system of the disclosure can provide a recommendation to the user to provide a high-fat diet to a female parent animal during prenatal development of the offspring animal. Relatedly, if the user prefers to produce an offspring animal having a red(-ish) bay coat, the database system of the disclosure can provide a recommendation to the user to provide the female parent a diet rich in oats, which are known to confer a red coloration to a bay coat in offspring animals.

[0248] In another example, a breeder may use the database system of the disclosure to select one or more desired traits that, in combination, dramatically increase the likelihood that a horse will have kissing spine, a condition characterized by positioning of two or more spinous processes (e.g., flanges of bone sticking up from the vertebra of the spine) in a way that they rub against each other, often producing back pain, bone cysts, arthritic changes, and other problems in affected horses. Thus, the database system of the disclosure can generate a set of guidelines for the breeder pertaining to the husbandry of a horse with kissing spines, including, e.g., avoiding training regimens that require jumping.

[0249] In an additional example, a breeder may use the database system of the disclosure to select one or more desired traits that, in combination, increase the susceptibility of a horse to, e.g., infection by the West Nile virus. Accordingly, the database system of the disclosure can generate a set of guidelines for the breeder that recommend timely vaccination of the susceptible horse.

[0250] In another example, a breeder may use the database system of the disclosure to select one or more desired traits that, in combination, increase the susceptibility of a horse to, e.g., Polysaccharide Storage Myopathy (PSSM). Accordingly, the database system of the disclosure can generate a set of guidelines for the breeder to provide a specific feed required to avoid the impending symptoms of PSSM, such as “tie-up,” muscle cramps, lameness, or pain. Furthermore, the guidelines may instruct to provide a horse with PSSM with regular exercise and low-sugar diets to avoid disease symptoms.

[0251] Additionally, a breeder may use the database system of the disclosure to select one or more desired traits that, in combination, increase the susceptibility of a horse to, e.g., equine asthma or other respiratory irritations (e.g., “bleeders”). Accordingly, the database system of the disclosure can generate a set of guidelines for the breeder to steam or pre-treat any grass, hay, or plant-based feeds that may contain allergenic particulates, airway irritants, or dust to reduce inflammation in the horse.

[0252] In yet another example, a breeder may use the database system of the disclosure to select one or more desired traits that, in combination, increase the susceptibility of a horse to, e.g., great size (e.g., “tall” type variants). Accordingly, the database system of the disclosure can generate a set of guidelines for the breeder to feed the horse a low-protein diet or other veterinarian-recommended or -supervised diets that mitigate accelerated growth and the known medical sequalae associated with such growth, such as, e.g., joint problems or Equine Osteochondritis Dissecans (OCD).

### Example 5: Use of a Computer-Implemented Database System to Produce a Genetically-Modified Non-Human Offspring Animal Having One or More Predetermined Traits

[0253] Using the systems and methods disclosed herein, a user (e.g., animal breeder, caretaker, owner, or seller) can interrogate the disclosed computer-implemented database system to produce a non-human offspring animal having one or more (e.g., 1, 2, 3, 4, 5, 6, 7, 8, 9, 10, or more) predetermined traits. A computer-implemented graphical user interface is used to query and interrogate the database system. As a first step, the user selects one or more predetermined traits that are desired in the offspring animal by way of the user interface, wherein the interface queries the database system to allow the user to identify one or more breeding pairs capable of producing the offspring animal.

[0254] In some cases, the database system of the disclosure may unsuccessfully identify an existing breeding pair capable of producing an offspring animal having one or more predetermined traits. To remedy this scenario, a user may genetically modify one or more (1, 2, 3, 4, or more) non-human animals of a breeding a pair to increase (e.g., by 5%, 10%, 15%, 20%, 30%, 40%, 50%, 60%, 70%, 80%, 90%, 100% or more) the likelihood of producing an offspring animal having the one or more predetermined traits using methods well-known in the art (e.g., transcription activator-like effector nuclease (TALEN), zinc finger nuclease (ZFN), or clustered regularly interspaced short palindromic repeats (CRISPR)). The user may interrogate the database system of the disclosure to identify one or more genotype-phenotype correlations to produce a genetic modification that would promote the expression of the desired phenotype in the parent and/or the offspring animal. The genotype-phenotype correlation may include a monogenic correlation (i.e., single gene controls the expression of a single phenotype) or a polygenic correlation (e.g., two or more genes control the expression of a single phenotype). This genotype-phenotype correlation may be used to determine which specific genes should be genetically modified in the one or more parent animals to increase the likelihood of producing an offspring animal having one or more predetermined traits. The user may further interrogate the database system of the disclosure to identify any deleterious or desirable genotype-genotype and/or phenotype-phenotype correlations to guide decision-making about trait selection prior to the genetic modification steps. Genotype-genotype correlations may be useful to apprise the user about any genetic associations between expression of a particular gene and a potentially deleterious genetic polymorphism or mutation in a region of the genome within or adjacent to the gene of interest. Phenotype-phenotype correlations may be particularly useful to a user by informing about a potential association between two or more phenotypes in a non-human animal. For example, if the user learns from the database system of the present disclosure that a particular desired phenotype may be associated with another undesired phenotype, the user may use this information to guide their decision about how to breed parental animals to obtain the desired offspring animal or about how to produce the offspring animal using genetic manipulation.

[0255] In other cases, the user may be unsuccessful in producing an offspring animal having one or more predetermined traits after breeding a breeding pair identified by the database system of the disclosure. In such instances, a user may decide to genetically modify the offspring animal to increase the likelihood that the offspring animal will have the one or more predetermined traits. For example, the user may use the database system of the disclosure to produce an offspring animal (e.g., according to the methods described in Example 1 above; see FIGS. 2A-2C). Genetic testing may be performed on a sample obtained from the animal during prenatal (e.g., embryonic) development (e.g., 3-60 days after conception) or after birth (e.g., one day to four years after birth) to determine the presence of the one or more predetermined traits. Non-genetic assessment may also be performed on the animal after birth (e.g., one day to four years after birth) to assist in the determination of the presence of the one or more predetermined traits in the offspring animal. If the genetic assessment during prenatal development or the genetic and/or the non-genetic assessment after birth indicates that the offspring lacks the one or more predetermine traits, the user may genetically modify the offspring animal to promote the expression of the one or more predetermined traits.

[0256] Additional cases in which genetic modification of a non-human offspring animal may be required include cases in which some, but not all desired traits are expressed in an offspring animal produced using the disclosed methods and systems. For example, in the case of a horse, a breeder may want to produce a gaited horse having a bay coat and white facial markings; however, upon producing the offspring animal using the disclosed methods, the breeder discovers (e.g., by way of genetic or non-genetic assessment of the offspring animal) that the offspring animal is gaited and has a bay coat, but lacks the white facial markings. In such a case, the breeder may employ the methods and systems of the disclosure to genetically modify the animal to also produce white facial markings in addition to the bay coat and the gaited phenotype.

[0257] Other cases that may require genetic modification of a non-human offspring animals include cases in which a particular trait of interest is partially, but not fully expressed to a level suitable for the breeder. For example, in the case of a horse, a breeder may wish to produce a horse that excels at jumping. After producing the offspring animal selected by the breeder to be a good jumper using the database system of the disclosure, the breeder may discover that the horse is a good jumper, but still underperforms relative to the breeder's expectation. In such a case, the breeder may use the disclosed methods and systems to genetically modify the offspring animal to ensure complete expression of the “excellent jumper” trait.

[0258] The genetic modification may be performed on one or more parent animals of a breeding pair or an offspring animal to modify at least one (e.g., at least 1, 2, 3, 4, 5, 6, 7, 8, 9, 10, or more) genes in the animal(s). In the case of an offspring animal, the genetic modification can be performed prenatally (e.g., during embryonic development, such as, e.g., 3-60 days after conception) or postnatally (e.g., after birth, such as, e.g., one day to four years after birth). The genetic modification may include editing of an endogenous gene in the one or more parent or offspring animals, such as, e.g., an endogenous gene having a genetic polymorphism (e.g., a single nucleotide polymorphism (SNP)) or a genetic mutation (e.g., insertion, deletion (e.g., knockout), translocation, inversion, single point mutation, or other mutation). The editing of the endogenous gene may include modifying, deleting, or replacing at least one (e.g., at least 1, 2, 3, 4, 5, 6, 7, 8, 9, 10, 20, 30, 40, 50, 60, 70, 80, 90, 100, 200, 300, 400, 500, 600, 700, 800, 900, 1000, 2000, 3000, 4000, 5000, 6000, 7000, 8000, 9000, 10000, or more) nucleotides of a DNA or an RNA encoding the endogenous gene in the parent animal. Alternatively, editing of an endogenous gene may include inserting a donor polynucleotide into a region of the endogenous gene for incorporation of the donor polynucleotide into the endogenous gene locus (e.g., by way of homologous recombination or non-homologous end-joining mechanisms). The donor polynucleotide may include a segment of an endogenous gene that lacks the genetic polymorphism or mutation. As another alternative, editing of an endogenous gene may include introducing a heterologous transgene into the genome of the one or more parent or offspring animals. As a further alternative, editing of an endogenous gene may include modulating (e.g., increasing or decreasing, e.g., by 1%, 5%, 10%, 15%, 20%, 25%, 30%, 45%, 50%, 55%, 60%, 65%, 70%, 75%, 80%, 85%, 90%, 95%, 100%, or more) the expression of an endogenous gene in the one or more parent or offspring animals. Modulation of endogenous gene expression may be performed, e.g., using a nuclease-inactivated CRISPR-Cas9 (dCas9) system containing a transcriptional regulator (e.g., activator or repressor). For increasing expression of an endogenous gene, a dCas9 system coupled to a transcriptional activator (e.g., VP16, VP64, p65, RTA, VPR, SAM, or SunTag) may be used. If the goal is to reduce expression of an endogenous gene, a dCas9 system coupled to a transcriptional repressor (e.g., KRAB) may be employed. Subsequent to the genetic modification, genetic and/or non-genetic assessment of the one or more parent or offspring animals may be performed to confirm the expression of the one or more predetermined traits. Genetic diagnostic testing may be performed using methods well-known in the art (Sanger sequencing, Next Generation Sequencing, microarray, AmpliSeq, genomic sequencing, or RT-qPCR). Non-genetic assessment may be performed by, e.g., observing the phenotypic expression of the one or more traits; obtaining or having obtained information from someone knowledgeable about the one or more parent or offspring animals pertaining to the one or more predetermined traits; performing or having performed one or more clinical assays on biological tissue obtained from the one or more parent or offspring animals pertaining to the one or more predetermined traits; performing or having performed one or more diagnostic tests on the one or more parent or offspring animals pertaining to the one or more predetermined traits; and/or obtaining scores assigned to the one or more parent or offspring animals during a competition pertaining to the one or more predetermined traits

[0259] Upon confirmation of the presence of the one or more predetermined traits in the offspring animal, the user may incorporate information about the offspring animal having the one or more predetermined traits into the database system.

### Example 6: Ancestry Determination in Horses Using a Computer-Implemented Database System

[0260] A user may interrogate the database of the present disclosure in order to determine or verify the pedigree of a non-human animal. As is discussed herein, horse enthusiasts have traditionally selected for specific traits in their foals based on information relating to the pedigree of the stallion and mare. The breeder optimized the likelihood of achieving the desired phenotype (e.g., one or more predetermined traits) in the foal by selecting a breeding pair capable of producing the desired phenotype. This strategy is encumbered by various sources of error that introduce uncertainty of achieving the target phenotype. For example, breeding decisions based on pedigree have long been made on the basis of self-reported testimony of the horse seller and/or based on an assumption that the foal inherits 50% of its genetic information from each parent, thereby relying on Mendelian genetics to determine the horse's pedigree. There are at least two problems with this approach, namely that (1) pedigree assignments based on presumed genetic inheritance often underestimate the degree of genetic relatedness (i.e., inbreeding) between the stallion and the mare; and (2) small changes in genotype can produce profound changes in phenotype, thus potentially confounding the initial judgment of the breed of the stallion and/or mare.

[0261] As an example, an ancestry analysis was performed for a particular horse (named “Cruising”) using the database system of the disclosure. A tissue sample was obtained from Cruising and submitted by a user via the user interface system of the disclosure, requesting genetic testing to be performed on the sample to ascertain the pedigree of the horse. The reference sample set was analyzed using genome-wide single nucleotide polymorphism (SNP) equine 70 K SNP chip (Illumina) using Admixture, PLINK, and Illumina's software. Breeds were sampled globally and the analysis on the 70,000 SNPs for all horses were compared to reference sets in the literature. After filtering for relevance, a subset of the SNPs were determined to be relevant for regional determination and comparison of referenced, known and reported genetic variation by global region. Each subset of SNPs corresponds to a region of reported “breed” or “type” form that global region, creating a new “reference” genetics set against which new horse samples are compared. Such comparison may be used to analyze similarities and/or differences between the subject horse and the reference set. Such analysis can then be used to determine the likelihood of likeness of “breed” or genetic inheritance similarity. Principal component analysis (PCA) was subsequently performed on the results of the genetic tests to determine the presence or absence of an overlap in genetic markers between a plurality of known breeds, groups, or registries of horses. Horses having similar genotypes appear as clusters of the same group color on the PCA plot (FIG. 3D). PCA analysis identified Cruising as being predominately a Thoroughbred (66%) and partly European Heavy Horse (Belgian, Clydesdale, and Franches Montagnes; 20.6%), Carriage Horse (French Trotter, Saddlebred, and Standardbred; 6.1%), Nordic Sea (Icelandic, North Swedish, and Shetland; 3.7%), British Isles Native/Exmoor (Exmoor and Fell Pony; 2.7%), and Iberian (Andalusian, Lusitano, Mangalara Paulista, and Pura Raza Espaniola; 0.7%; FIG. 3A-3D).

[0262] In another example, an ancestry analysis was performed for another horse named “Spooks Gotta Whiz” (“Spooks”). A tissue sample was obtained from Spooks and submitted by a user via the user interface system of the disclosure, requesting genetic testing to be performed on the sample to ascertain Spooks's breed composition. In addition to the PCA analysis described above for Cruising, an ADMIXTURE-based breed composition analysis (Alexander et al. Genome Res. 19:1655-64, 2009; incorporated by reference herein) was performed to assess the contribution of various known breeds to Spooks's genetic profile. The PCA-based analysis identified Spooks as being predominately Thoroughbred (34%) and partially Carriage Horse (24.3%), European Heavy Horse (15.5%), Near East (12.3), Iberian (11.3%), Exmoor (1.3%), and North Sea (1.3%) (FIGS. 8A, 8B, and 8E). The ADMIXTURE-based analysis provided a further view into Spooks's breed composition, further showing that the Near East component includes an Arabian breed, the Iberian component includes 8% Puerto Rican Paso and 3% Pura Raza Espanola, the Carriage Horse component includes 14% Saddlebred, 4% Standardbred, and 6% French Trotter, the European Heavy Horse component includes 2% Clydesdale, 9% Franches Montagnes, and 4% Belgian, and the North Sea component includes 1% Norwegian Fjord (FIGS. 8A-8D).

[0263] Furthermore, the analysis revealed a Heterozygosity score of 31.5%—this metric is a measure of genetic diversity (e.g., the number of genetic variants within an individual) and generally correlates with overall health of resilience to illness of the animal. The analysis further revealed Spooks as having an inbreeding score (F value) of 6.532%—this measure is derived from the genetic diversity within an individual and is based on information obtained from genetic testing, as is described herein.

[0264] These findings indicate that the computer-implemented database system of the disclosure can be used in combination with the user interface system described herein to ascertain ancestral relationships within and between particular animals and is, therefore, useful for animal breeders in identifying or producing animals having an advantageous phenotypic profile. In particular, the ancestry/breed information for a given animal(s) generated using the database system of the disclosure can be iteratively incorporated into the database system to facilitate the selection or production of animals having one or more predetermined traits, to facilitate trait discovery, to identify specific predispositions or health conditions within the animal, and to identify new correlations between genetic and non-genetic traits of the animal.

### Example 7: Parentage Determination in a Horse Using the Database System of the Disclosure

[0265] A user may interrogate the database of the present disclosure in order to determine or verify the parentage of a non-human offspring animal (e.g., horse) whose parentage is fully or partially unknown (i.e., both parents are unknown, or a single parent is unknown). For example, results of genetic testing of a non-human animal (e.g., horse) can be analyzed and compared to results of genetic testing of a plurality of horses catalogued in the database system of the disclosure. A variety of genetic markers (e.g., SNPs, such as, e.g., exclusion SNPs or microsatellites) can be used to test across a large number of carefully selected genes (e.g., any one of the genes disclosed herein, among others) to test for parentage between horses. An exclusion SNP can be used to rule out the likelihood that an offspring animal and a candidate parent animal are related. Generally, SNPs can be used to define an exclusion probability, which is the average capability of any genetic marker to exclude a group of unrelated individuals from a family. Typically, an individual is excluded as the parent of an offspring if the offspring's genotype at a particular genetic locus cannot be produced from the genotype of the candidate parent animal based on Mendelian inheritance and genetic mutations.

[0266] The database system may employ a comparison engine that assesses the degree of overlap between the genotype of a subject offspring horse whose parentage is fully or partially unknown and a plurality of candidate parent animals. The database system may then produce a probability matrix containing an array of exclusion probability values for one or more candidate parent animals. A low exclusion probability value (e.g., 12% or less, such as, e.g., 12%, 11%, 10%, 9%, 8%, 7%, 6%, 5%, 4%, 3%, 2%, 1%, or less) would indicate a high likelihood that the offspring animal and the candidate parent animal are related. Similarly, the database system may produce the absolute quantities for the number of exclusion SNPs identified in the one or more candidate parent animals (e.g., see FIG. 4A). A low number (e.g., less than 5, such as, e.g., 4, 3, 2, 1, or 0) of exclusion SNPs identified between the subject offspring animal and a candidate parent animal would also indicate a high probability that the two animals are related.

[0267] In a particular example, parentage analysis was performed for an offspring animal (“Mystery Foal”) using the database system of the disclosure. A tissue sample was obtained from Mystery foal and submitted for genetic testing using the database system. The genetic profile of Mystery Foal was assessed across a panel of select biomarkers and compared to the genetic profiles of a plurality (98) of horses catalogued in the database system to identify candidate parents. The database system identified a particular horse (“GUAPE: 033920_032”) as a likely parent of Mystery Foal based on the fact that no exclusion SNPs were identified between the two horses, suggesting a high probability of relatedness. Other horses (e.g., TEQUE: 033920_033) were ruled out as a candidate parent based on the presence of a large number (9) of exclusion SNPs observed between the pair (FIG. 4).

### SPECIFIC EMBODIMENTS

[0268] Some specific embodiments are listed below. The below enumerated embodiments should not be construed to limit the scope of the invention, rather, the below are presented as some examples of the utility of the invention.
[0269] E1. A method of producing a non-human offspring animal having one or more predetermined traits, the method comprising:
   [0270] (a) selecting one more predetermined traits desired in the offspring animal using a computer-implemented database system;
   [0271] (b) interrogating the database system to identify one or more breeding pairs capable of producing the offspring animal;
   [0272] (c) generating a probability matrix for each of the one or more breeding pairs using the database system, wherein the probability matrix comprises an array of probability values pertaining to the likelihood that the offspring animal produced by each said breeding pair will have the one or more predetermined traits;
   [0273] (d) selecting, based on the array of probability values, one or more of the breeding pairs likely to produce the offspring animal having the one or more predetermined traits;
   [0274] (e) breeding one or more of the selected breeding pairs to produce the offspring animal;
   [0275] (f) performing genetic testing of the offspring animal to detect the presence of the one or more predetermined traits; and
   [0276] (g) genetically modifying the offspring animal lacking the one or more predetermined traits to promote or improve expression of the one or more predetermined traits.
[0277] E2. The method of E1, wherein the genetic testing of step (f) and/or the genetic modification of step (g) is performed in the offspring animal during embryonic development.
[0278] E3. The method of E1, wherein the genetic testing of step (f) and/or the genetic modification of step (g) is performed in the offspring animal 3-60 days after conception.
[0279] E4. The method of any one of E1-E3, further comprising birthing the offspring animal.
[0280] E5. The method of E1 or E4, wherein the genetic testing of step (f) and/or the genetic modification of step (g) is performed in the offspring animal one day to four years after birth.
[0281] E6. The method of any one of E1-E5, further comprising confirming the presence of one or more predetermined traits in the offspring animal after birth.
[0282] E7. The method of any one of E1-E6, wherein the genetic testing is performed on a sample obtained from the offspring animal.
[0283] E8. The method of E7, wherein the sample comprises blood, tissue, hair, an embryo of the offspring animal implanted as part of an in vitro fertilization procedure, cell-free fetal DNA, mitochondria, or a gamete.
[0284] E9. The method of E8, wherein the gamete is an oocyte.
[0285] E10. The method of E8, wherein the gamete is a spermatozoon.
[0286] E11. The method of any one of E8-E10, wherein the gamete comprises a cytoplasm, a nucleus, a mitochondrion.
[0287] E12. The method of any one of E1-E11, wherein the genetic testing is performed using Sanger sequencing, Next Generation Sequencing, microarray, AmpliSeq, genomic sequencing, or real-time quantitative polymerase chain reaction (RT-qPCR).
[0288] E13. The method of any one of E4-E12, further comprising genetically modifying the offspring animal lacking the one or more predetermined traits after birth.
[0289] E14. The method of any one of E1-E13, wherein the expression of the one or more predetermined traits results from expression of one or more genes.
[0290] E15. The method of any one of E1-E14, wherein genetically modifying the offspring animal comprises modifying at least 1, at least 2, at least 3, at least 4, at least 5, at least 6, at least 7, at least 8, at least 9, or at least 10 genes in the offspring animal.
[0291] E16. The method of any one of E1-E15, wherein genetically modifying the offspring animal comprises editing of an endogenous gene in the offspring animal.
[0292] E17. The method of E16, wherein the endogenous gene comprises a polymorphism.
[0293] E18. The method of E16, wherein the endogenous gene comprises a genetic mutation.
[0294] E19. The method of any one of E16-E18, wherein the editing of the endogenous gene comprises modifying, deleting, or replacing at least one nucleotide of a DNA or an RNA encoding the endogenous gene in the offspring animal.
[0295] E20. The method of any one of E16-E19, wherein the editing of an endogenous gene comprises inserting a donor polynucleotide into a region of the endogenous gene in the offspring animal.
[0296] E21. The method of E20, wherein the donor polynucleotide comprises a segment of the endogenous gene that lacks the polymorphism.
[0297] E22. The method of E20, wherein the donor polynucleotide comprises a segment of the endogenous gene that lacks the genetic mutation.
[0298] E23. The method of any one of E16-E18, wherein the editing of an endogenous gene comprises administering to the offspring animal a polynucleotide encoding one or more copies of a wild type variant of the endogenous gene.
[0299] E24. The method of any one of E16-E18, wherein editing of an endogenous gene comprises introducing a heterologous transgene into the genome of the offspring animal.
[0300] E25. The method of any one of E16-E24, wherein editing of an endogenous gene comprises modulating expression of an endogenous gene in the offspring animal.
[0301] E26. The method of any one of E16-E25, wherein genetically modifying the offspring animal is performed using a clustered regularly interspaced short palindromic repeats (CRISPR)-Cas system, a transcription activator-like effector nuclease (TALEN), or a zinc finger nuclease (ZFN).
[0302] E27. The method of E26, wherein the CRISPR-Cas system comprises at least one guide RNA (gRNA) and at least one Cas9 endonuclease.
[0303] E28. The method of E27, wherein the Cas9 endonuclease comprises a nuclease-competent Cas9 endonuclease or a nuclease-inactivated Cas9 (dCas9) endonuclease.
[0304] E29. The method of E28, wherein the dCas9 endonuclease is fused to a transcriptional regulator domain.
[0305] E30. The method of E29, wherein the transcriptional regulator domain is selected from a group consisting of VP16, VP64, p65, RTA, VPR, SAM, SunTag, and KRAB.
[0306] E31. The method of any one of E1-E30, wherein the breeding pair capable of producing the offspring animal is integrated into the database system by:
   [0307] (a) providing information about one or more predetermined traits in the breeding pair, wherein the information comprises:
      [0308] i. results of previously performed genetic testing and/or non-genetic assessment of the breeding pair, wherein the results of the previously performed genetic testing or non-genetic assessment identify the breeding pair as having one or more of the predetermined traits; and/or
      [0309] ii. results of genetic testing and/or non-genetic assessment of the breeding pair confirm the presence of one or more of the predetermined traits the breeding pair;
   [0310] (b) cataloguing the information of step (a) into the database system;
[0311] wherein the database system is configured for interrogation by a user and is configured to produce the probability matrix of step (c) of E1 following said interrogation.
[0312] E32. The method of any one of E1 to E31, further comprising registering the offspring animal having the one or more predetermined traits in the database system as a breeder animal.
[0313] E33. A method for interrogating a computer-implemented database system to identify one or more breeding pairs capable of producing a non-human offspring animal having one or more predetermined traits, the method comprising the steps of:
   [0314] (a) selecting one or more predetermined traits desired in the offspring animal using the database system;
   [0315] (b) identifying the one or more breeding pairs capable of producing the offspring animal using the database system;
   [0316] (c) generating a probability matrix for each of the one or more breeding pairs using the database system, wherein the probability matrix comprises an array of probability values pertaining to the likelihood that the offspring animal produced by each said breeding pair will have the one or more predetermined traits and displaying the probability matrix on a computer-implemented interface;
   [0317] (d) selecting, based on the array of probability values, one or more of the breeding pairs likely to produce the offspring animal having the one or more predetermined traits; and
   [0318] (e) breeding the one or more breeding pairs to produce the offspring animal;
[0319] wherein the database comprises a panel of at least 2 predetermined traits.
[0320] E34. The method of E33, wherein the database comprises a panel of 2-40 predetermined traits.
[0321] E35. The method of E34, wherein the database comprises a panel of at least 4 predetermined traits.
[0322] E36. The method of E35, wherein the database comprises a panel of at least 6 predetermined traits.
[0323] E37. The method of E36, wherein the database comprises a panel of at least 8 predetermined traits.
[0324] E38. The method of E37, wherein the database comprises a panel of at least 10 predetermined traits.
[0325] E39. The method of E33, wherein the method comprises selecting a panel of 2-40 predetermined traits.
[0326] E40. The method of E39, wherein the method comprises selecting a panel of 2 or more predetermined traits.
[0327] E41. The method of E40, wherein the method comprises selecting a panel of 4 or more predetermined traits.
[0328] E42. The method of E41, wherein the method comprises selecting a panel of 6 or more predetermined traits.
[0329] E43. The method of E42, wherein the method comprises selecting a panel of 8 or more predetermined traits.
[0330] E44. The method of E43, wherein the method comprises selecting a panel of 10 or more predetermined traits.
[0331] E45. The method of E33, further comprising confirming the presence of one or more of the predetermined traits in the offspring animal.
[0332] E46. The method of E45, wherein the method comprises confirming the presence of 2-40 predetermined traits.
[0333] E47. The method of E46, wherein the method comprises confirming the presence of 2 or more of the predetermined traits.
[0334] E48. The method of E47, wherein the method comprises confirming the presence of 4 or more of the predetermined traits.
[0335] E49. The method of E48, wherein the method comprises confirming the presence of 6 or more of the predetermined traits.
[0336] E50. The method of E49, wherein the method comprises confirming the presence of 8 or more of the predetermined traits.
[0337] E51. The method of E50, wherein the method comprises confirming the presence of 10 or more of the predetermined traits.
[0338] E52. The method of any one of E33 to E51, wherein genetic testing was previously performed on the breeding pair.
[0339] E53. The method of any one of E33 to E52 further comprising registering the offspring animal having the one or more predetermined traits in the database system as a breeder animal.
[0340] E54. A method of producing a set of guidelines for breeding of a non-human animal, comprising:
   [0341] (a) identifying the non-human animal in a computer-implemented database and assessing the presence of one or more predetermined traits in the non-human animal using the computer-implemented database system, comprising:
   [0342] (b) generating a probability matrix for the non-human animal using the database system, wherein the probability matrix comprises an array of probability values pertaining to the likelihood that the non-human animal has the one or more predetermined traits; and
   [0343] (c) displaying the probability matrix on a graphical user interface;
   [0344] (d) determining, based on the assessment of step (a), one or more conditions under which the non-human animal will develop or is at risk of developing a disease or non-disease condition; and
   [0345] (e) generating the set of guidelines for breeding of the non-human animal to avoid manifestation of the disease or non-disease condition.
[0346] E55. The method of E54, wherein the non-human animal is used in a breeding pair to produce an offspring animal.
[0347] E56. The method of E54 or E55, wherein the set of guidelines comprises one or more recommendations for mitigating or avoiding the one or more conditions that would result in manifestation of one or more symptoms of the disease or non-disease condition and/or for reducing the likelihood of producing an effect in the offspring animal resulting from development of the disease or non-disease condition.
[0348] E57. The method of any one of E54-E56, wherein the non-human animal is a female parent animal.
[0349] E58. The method of any one of E54-E56, wherein the non-human animal is a male parent animal.
[0350] E59. The method of any one of E54-E58, wherein the set of guidelines provides one or more recommendations that increases the likelihood of producing a non-human offspring animal having one or more predetermined traits.
[0351] E60. The method of E59, wherein the one or more recommendations pertain to a diet, exercise regime, discipline, environmental exposure, medication, supplementary treatments, training, conditioning, use, or and/or limitation the non-human animal.
[0352] E61. A method of generating a computer-implemented database system for producing a non-human offspring animal having one or more predetermined traits, comprising:
   [0353] (a) providing information about the one or more predetermined traits from a plurality of non-human animals of a same type as the offspring animal, wherein the information comprises:
      [0354] (a) results of previously performed genetic testing and/or non-genetic assessment of the plurality of non-human animals, wherein the results of the previously performed genetic testing or non-genetic assessment identify the plurality of non-human animals as having one or more of the predetermined traits; and/or
      [0355] (b) results of genetic testing and/or non-genetic assessment of the plurality of non-human animals that confirm the presence of one or more of the predetermined traits in the plurality of non-human animals;
   [0356] (b) cataloguing the information of step (a) into the database system;
[0357] wherein the database system is configured for interrogation by a user and is configured to produce a probability matrix based on the information catalogued in step (b) following said interrogation.
[0358] E62. The method of E61, wherein the interrogation comprises selecting one or more predetermined traits desired in the offspring animal and identifying from the plurality of non-human animals a breeding pair capable of producing said offspring animal.
[0359] E63. The method of E61 or E62, further comprising selecting a breeding pair capable of producing the offspring having the one or more predetermined traits.
[0360] E64. The method of E63, wherein the probability matrix comprises an array of probability values pertaining to the likelihood of the selected breeding pair producing a non-human offspring animal having the one or more predetermined traits.
[0361] E65. The method of any one of E61-E63, wherein the probability matrix comprises an array of probability values pertaining to the likelihood of the plurality of non-human animals having the one or more predetermined traits.
[0362] E66. The method of any one of E61-E65, wherein the non-genetic assessment comprises:
   [0363] (a) obtaining or having obtained information from someone knowledgeable about the non-human animal pertaining to the one or more predetermined traits;
   [0364] (b) performing or having performed one or more clinical assays on biological tissue obtained from the non-human animal pertaining to the one or more predetermined traits;
   [0365] (c) performing or having performed one or more diagnostic tests on the non-human animal pertaining to the one or more predetermined traits; and/or
   [0366] (d) obtaining scores assigned to the non-human animal during a competition pertaining to the one or more predetermined traits.
[0367] E67. A computer-implemented interface for assisting a user in producing, procuring, and/or identifying one or more non-human animals having one or more predetermined traits, wherein the interface is configured to allow a user to interrogate a computer-implemented database system, the interrogation comprising:
   [0368] (a) selecting the one or more predetermined traits of interest for the one or more non-human animals;
   [0369] (b) identifying one or more of the non-human animals catalogued in the database system and generating a probability matrix for each of the one or more non-human animals identified using the database system;
   [0370] (c) based on the probability matrix of step (d), displaying an overall assessment of each of the non-human animals having the one or more predetermined traits; and
   [0371] (d) providing an option for the user to produce, purchase, or lease one or more of the non-human animals having the one or more predetermined traits;
[0372] wherein the computer-implemented interface is in communication with the database system.
[0373] E68. The method of E67, wherein step (a) further comprises selecting one or more predetermined traits of at least one parent of the one or more non-human animals.
[0374] E69. The interface of E67 or E68, wherein step (a) further comprises selecting a gene pool from which the one or more non-human animals or the at least one parent of the non-human animal are obtained.
[0375] E70. The method of E69, wherein the gene pool is selected from a group consisting of the user's own animals, animals owned by other users, an animal registry, and animals located within a specified geographical area.
[0376] E71. The method of any one of E67-E70, wherein the probability matrix comprises an array of probability values pertaining to the likelihood of the non-human animal having one or more predetermined traits.
[0377] E72. A method using a computer-implemented database system to identify a non-human animal as having one or more predetermined traits, comprising:
   [0378] (a) providing information about the non-human animal;
   [0379] (b) cataloguing the information of step (a) into the database system;
   [0380] (c) comparing the information of step (b) to information about a plurality of non-human animals having the one or more predetermined traits, wherein the information about the plurality of non-human animals has been previously catalogued in the database system;
   [0381] (d) generating a probability matrix for the non-human animal based on the comparison of step (c) using the database system, wherein the probability matrix comprises an array of probability values pertaining to the likelihood that the non-human animal has the one or more predetermined traits;
   [0382] (e) identifying the non-human animal as having the one or more predetermined traits based on the probability matrix of step (d); and
   [0383] (f) optionally, genetically modifying the non-human animal to promote or suppress an expression of the one or more predetermined traits in the non-human animal;
[0384] wherein the information comprises results of previously performed genetic testing and/or non-genetic assessment of the non-human animal or the plurality of non-human animals.
[0385] E73. The method of any one of E1-E72, wherein the one or more predetermined traits comprise coat color, coat color modifier, coat texture, coat thickness, facial marking, leg marking, eye color, skin color, mane color, tail color, speed, gait, temperament, and health.
[0386] E74. The method of E73, wherein the coat color, mane color and/or tail color is selected from a group consisting of amber champagne, amber champagne dun, amber cream, amber dun, amber dun pearl, apricot dun, apricot pearl, agouti, bay, bay cream pearl, bay double cream, bay pearl, black, black bay, black cream pearl, black double cream, black dun, black pearl, black/red, blanket appaloosa, blood bay, blue roan, brindle, brown, buckskin, buttermilk buckskin, champagne, champagne amber pearl, champagne classic pearl, champagne dun, champagne dun pearl, champagne gold pearl, champagne pearl, chesetnut, chestnut cream pearl, chocolate, classic champagne, classic champagne dun, classic cream, classic dun, cream, cream champagne, cream grullo, cream pearl, cremello, dapple grey, dark bay, dark brown, dark chestnut, dominant white, dun, dun bay cream, dun bay double cream, dun black cream, dun black double cream, dun chestnut cream, dun chestnut double cream, dun pearl, dun pearl bay, dun pearl black, dunalino, dunolino, dunskin, dunskin splash, flaxen chestnut, fleabitten grey, frame overo, frosted appaloosa, grey, gold champagne, gold cream, gold dun, gold dun pearl, grey, grullo, half blanket, leopard appaloosa, light grey, liver chestnut, marbled appaloosa, overo, palomino, pearl, perlino, perlino dun, pseudocream classic, red, red chestnut, red dun, red roan, rose grey, sabino, seal brown, silver, silver amber champagne, silver amber dun, silver bay cream, silver bay cream pearl, silver bay double cream, silver black, silver black cream pearl, silver black double cream, silver champagne, silver champagne dun, silver champagne pearl, silver classic champagne, silver classic champagne pearl, silver cream pearl, silver dapple, silver dapple bay, silver dapple buckskin, silver dapple cream grullo, silver dapple dun, silver dapple dunskin, silver dapple grullo, silver dapple pearl, silver dapple perlino, silver dapple perlino dun, silver dun, silver dun bay cream, silver dun bay double cream, silver dun black, silver dun black double cream, silver dun pearl, silver dun pearl bay, silver dun pearl black, silver pearl bay, silver pearl black, silver red, silver smoky cream, skewbald, smoky black, smoky cream, smoky grullo, snowflake appaloosa, sorrel, splashed white, steel grey, sun, tobiano, tovero, tri-color, white, and white spotting.
[0387] E75. The method of E73, wherein the coat color modifier is selected from a group consisting of apron, barring on body, barring on shoulder, belly spots (large or small), belly stripe, belted, bend or spots on body, bend or spots on head, birdcatcher spots, black spots, blagdon, blanket with roaning, blanket with spots, blaze, blaze with freckling, body spots, body white, brindle, brow spots, calico, coon/skunk tail, dapples, dilute, dorsal stripe, double dilute, ermine markings, few white hairs on body, fewspot, flaxen mane/tail, flea-bitten, fleshmark, frosted, grullo, heart marking, highlights in mane/tail, lacing pattern, leopard spotted, lightning marks, line back, frosting mane/tail, maximum tobiano, maximum overo, maximum white, maximum white sabino, medicine hat, minimal overo, minimal sabino, minimal tobiano, mixed mane/tail, mottled, no marking, overo, pangare, paw prints, pearl, piebald, pinto markings, rabicano, roan, roaning on body, rose, rump spots, sabino, skewbald, smudge marks, smutty, snip, snowcap, sooty, splash markings, star, stripe, tobiano, umbilical spots, white head, white mane/tail, white throat latch, white tipped ears, white with fading edges, white with ragged edges, white with smooth edges, wither spot, no markings, solid, white blaze, and white star.
[0388] E76. The method of E73, wherein the facial marking is selected from a group consisting of apron face, badger face, bald face, blaze, interrupted stripe, face, snip, star, stripe markings, both eyes amber, both eyes blue, both eyes brown, both eyes green, both eyes tiger, eyebrows, face mask, few white hairs on forehead, left eye amber, left eye blue, left eye brown, left eye green, left eye partial blue, left eye tiger, partial bald face, pigment around eye, right eye amber, right eye blue, right eye brown, right eye green, right eye partial blue, right eye tiger, white around eye, white chin, white jaw, white lip, white nose, and white sclera.
[0389] E77. The method of E73, wherein the leg marking is selected from a group consisting of two back white stockings, two white front socks, two white front stockings, two white hind socks, two white hind stockings, four white socks, four white stockings, back left above hock, back left cannon (¾ stocking), back left coronet, back left ermine spots, back left fetlock, back left half pastern, back left heel, back left partial heel, back left pastern, back left sock, back left stocking, back left stripes, back right above hock, back right cannon, back right coronet, back right ermine spots, back right fetlock, back right half pastern, back right heel, back right partial heel, back right pastern, back right sock, back right stocking, back right stripes, barring on legs, bend or spots on legs, front left above knee, front left cannon, front left coronet, front left ermine spots, front left fetlock, front left half pastern, front left heel, front left partial heel, front left pastern, front left sock, front left stocking, front left stripes, front right above knee, front right cannon, front right coronet, fright right ermine spots, front right fetlock, front right half pastern, front right heel, front right partial heel, front right pastern, front right sock, front right stocking, front right stripes, left front hoof stripes, left front white foot, left hind hoof stripes, left hind white foot, right front hoof stripes, right front white foot, right hind hoof stripes, right hind white foot, and roaning on white socks/stockings.
[0390] E78. The method of E73, wherein the coat texture comprises smooth, rough, curly, straight, downy, spiky, or brindle.
[0391] E79. The method of E73, wherein the coat thickness comprises thick, medium, or thin.
[0392] E80. The method of E73, wherein the eye color comprises blue, amber, yellow, orange, hazel, green, or brown.
[0393] E81. The method of E73, wherein the skin color comprises pink, black, brown, yellow, and white.
[0394] E82. The method of E73, wherein the speed is selected from the group consisting of endurance, mid-distance, and sprint.
[0395] E83. The method of E73, wherein the gait is selected from the group consisting of non-gaited, gait carrier, and gaited.
[0396] E84. The method of E83, wherein gaited comprises walk, trot, canter, gallop, pacing, fox trot, racking, country pleasure, Indian shuffle, jogging, paso fino, paso corto, paso largo, paso llano, sobrandando, marcha picada, rack, running walk, stepping pace, singlefoot, tölt, and ravaal.
[0397] E85. The method of E73, wherein the temperament is selected from the group consisting of vigilant, curious/vigilant, curious, spooky, non-spooky, hot, cold, and medium.
[0398] E86. The method of E73, wherein the health comprises variants of one or more genes associated with one or more disease or non-disease conditions that are undesired in the non-human animal.
[0399] E87. The method of any one of E1-E86, wherein each of the one or more breeding pairs comprise at least a first non-human parent animal and a second non-human parent animal.
[0400] E88. The method of any one of E1-E87, wherein the method further comprises selecting the sex, breed, and/or discipline of the offspring animal, the first parent animal, and/or the second parent animal.
[0401] E89. The method of E88, wherein the breed is selected from the group consisting of Abyssianian/Ethiopian/Oromo/Gala horse, Abyssinian, Akhal Teke, Albanian, Albanian Horse, Alt-Olderburger, Altai Horse, American Cream Draft, American Cream and White, American Curly, American Gaited Mountain Horse, American Gaited Pony, American Paint Horse, American Quarter Horse, American Saddlebred, American Walking Pony, American Warmblood, Andalusian, Andravida, Andravida/Eleia Horse, Anglo European Warmblood, Anglo-Arab, Anglo-Kabarda, Appaloosa, Appendix Quarter Horse, AraAppaloosa, Arabian, Arabian Sporthorse, Ardennes, Ardennes Horse, Argentine Criollo, Asturcon, Asturian, Australian Brumby, Australian Stock Horse, Austrian Warmblood, Azteca, Baise Horse, Balearic, Baluchi, Baluchi Horse, Ban-ei, Banker, Banker Horse, Barb, Barb/Berber Horse, Bashkir, Bashkir Curly, Bashkir Curly Horse, Bashkir Horse, Basotho Pony, Basuto Pony, Belgian, Belgian Draft, Belgian Warmblood, Bhirum Pony, Bhirum/Nigerian Pony, Bhotia Pony, Bhutia Pony, Black Forest, Black Forest Pony, Blue Eyed Horse Association, Boer, Boerperd, Brandenburger, Breton, Breton Horse, British Riding Pony, British Warmblood, Buckskin, Budyonny, Budyonny Horse, Byelorussian Harness, Byelorussian Harness Horse, Camargue, Camargue Horse, Campolina, Canadian Horse, Canadian Sport Horse, Canadian Suffield Mustang, Canadian Warmblood, Carolina Marsh Tacky, Carthusian, Caspian, Caspian Horse, Cayuse, Celtic Warmblood, Cheju, Chicoteague Pony, Chilean Corralero, Chilean Corralero Horse, Chincoteague Pony, Cleveland Bay, Clydesdale, Colorado Ranger Horse, Connemara, Cream Draft, Cremello, Criollo, Crioulo, Curly Horse, Dales Pony, Danish Warmblood, Danube, Danube Delta Horse, Dartmoor Pony, Deliboz, Deliboz/Delibozskaya, Djerma, Dole, Dole Gudbrandsdal/Dolahest/Døle, Dongola, Donkey, Draft, Draft Cross, Draft Horse, Drum Horse, Dutch Draft, Dutch Harness, Dutch Harness Horse, Dutch Warmblood, East Bulgarian, East Friesian, Egyptian, Egyptian Arabian, Eriskay Pony, Estonian Horse/Estonian Native/Estonian Klepper/Eisti Hobune, Estonian Native, Exmoor Pony, Faeroe Pony, Faeroes Pony, Falabella, Falabella Miniature Horse, Fell Pony, Ferghana, Finnhorse, Finnhorse/Finnish Horse, Fjord, Fjord Horse, Fleuve, Florida Cracker, Florida Cracker Horse, Foundation Quarter Horse, Fouta, Foutanke/Fouta, Frederiksborg, Frederiksborg Horse, French Saddlebred, French Saddlebred Horse, French Trotter, Friesian, Friesian Cross, Galiceño, Galician Pony, Galician/Galician Mountain Horse, Gelderlander, Georgian Grande, German Bred, German Riding Pony, Gidran, Gidran/Hungarian Anglo-Arab, Golden American Saddlebred, Gotland, Gotland Pony, Groningen, Groningen Horse, Guangxi, Gypsy Cob, Gypsy Vanner, Hackney, Hackney Horse, Hackney Pony, Haflinger, Half-Arabian, Hanoverian, Hanoverian Warmblood, Hequ, Highland Pony, Hokkaido, Hokkaido Horse, Holsteiner, Holsteiner Warmblood, Hucul, Hucul Pony, Hungarian Warmblood, Iberian Warmblood, Icelandic, Icelandic Horse, lomud, lomud/Yomud/Yamud/Yomut, Irish Cob, Irish Draft, Irish Draught, Irish Draught Horse, Irish Sport Horse, Jeju Horse, Jinzhou, Jutland, Kabarda, Kabarda/Kabardin, Karabair, Karabakh, Kazakh, Kazakh Horse, Kentucky Mountain horse, Kentucky Mountain Saddle Horse, Kerry Bog Pony, KigeR Mustang, Kirdi Pony, Kisber Felver, Kiso, Kiso Horse, Kladbury, Kladbury Horse, Knabstrup, Knabstrupper Warmblood, Kushum, Kushum Horse, Kustanai, Kustanai Horse, Kyrgyz/Kirgiiz Horse, Latvian, Latvian Horse, Lipizzan, Lithuanian Heavy Draft, Lokai, Losino, Losino Horse, Lusitano, M Bayar, Mallorquin, Malopolski, Mangalarga, Mangalarga Marchador, Marsh Tacky, Marwari, Marwari Horse, Wrens Pony, Messara, Messara Horse, Miniature, Miniature Horse, Misaki, Misaki Horse, Missouri Fox Trotter, Missouri Fox Trotting Horse, Miyako, Miyako Pony, Mongolian, Mongolian Horse, Morab, Morgan, Mountain Pleasure Horse, Moyle, Mule, Murgese, Mustang, National Show horse, National Spotted horse, New Forest Pony, New Kirgiz, Newfoundland Pony, Nokota, Nokota Horse, Noma, Noma Horse, Nooitgedacht Pony, Nordland, Nordlandshest/Lyngshest/Nordland Pony, Norfolk Trotter, Noric, North Swedish horse, Northeastern, Ob, Oldenburg, Oldenburg Warmblood, Orlov Trotter, Paint (Overo), Paint (Solid), Paint (Tobiano), Paint (Tovero), Paints (All), Palomino, Pantaneiro, Pantaneiro horse, Paso Fino, Paulista Marchador, Peneia Pony, Percheron, Peruvian Paso, Pindos Pony, Pinia, Pintabian, Pinto, POA, Polish Horse, Ponies (All), Pony, Pony of America, Pottok, Priob/Ob, Przewalski, Przewalski Horse, Pura Raza Espanola (PRE), Pyrenean Tarpan, Qatgani, Qatgani/Qataghani Horse, Quarab, Quarter Horse, Quarter Horse Cross, Quarter Pony, Racking Horse, Rheinland Pfalz Saar, Rhenish Warmblood, Rhinelander horse, Rocky Mountain, Rocky Mountain Horse, Russian Don, Russian Heavy Draft, Russian Trakhener, Russian Trotter, Sanhe, Sanhe Horse, Schleswiger Heavy Draft, Scharzwälder Fuchs, Selle Francais, Shagya, Shagya Arabian, Shetland Pony, Shire, Single-Footing Horse, Skyros Pony, Somali Pony, Sorraia, Soviet Heavy Draft, Spanish Mustang, Spanish-Barb, Spanish-Norman, Spanish-Normal Horse, Sport Horse of Color, Spotted Draft, Spotted Draft Horse, Spotted Saddle, Spotted Saddle Horse, Standardbred, Sudan Country-Bred, Sudan Country-Bred Horse, Suffolk, Suffolk/Suffolk Punch/Suffolk Sorrel, Swedish Warmblood, Taishu/Tsushima, Taishuh, Tarpan, Tawleed, Tennessee Walker, Tennessee Walking Horse/Tennessee Walker, Tersk, Tersk Horse, Thessalian, Thessalian/Thessaly Horse, Thoroughbred, Thoroughbred Cross, Tibetan Pony, Tiger horse, Tokara, Tori, Tori Horse, Trakehner, Ukrainian Riding Horse/Ukrainian Saddle Horse, Ukrainian Saddle, Virginia Highlander, Vlaamperd, Vladimir Heavy Draft, Vyatka, Vyatka Horse, Walkaloosa, Warmblood, Warmblood Cross, Warmblood (All), Warmbloods of Color, Welara Pony, Welsh Cob, Welsh Pony, Weser-Em Pony, West African Barb, Western Sudan Pony, Westphalian, Wielkopolski, Wurttemberger Warmblood, Xilingol, Yakut, Yanqi, Yili, Yonaguni, Zangersheide, Zaniskari Pony, Zhemaichu, and Zorse. E90. The method of E89, wherein the discipline is selected from the group consisting of barrel racing, beginner/family, breeding, brood mare, calf roping, companion only, competitive trail competitions, country pleasure, cowboy mounted shooting, cutting, draft, dressage, drill team, driving, endurance riding, English pleasure, equitation, eventing, field hunter, gaited, halter, harness, horsemanship, hunter, hunter under saddle, judged pleasure rides, jumper, lesson horse, longe-line, pleasure driving, pole bending, polo, racing, ranch horse, ranch sorting, reined cow horse, reining, rodeo, roping, showmanship, saddle seat, sidesaddle, steer wrestling, team penning, team roping, team sorting, trail horse, vaulting, Western pleasure, Western pleasure (show), Western riding, working cattle, youth/4-H horse, all around, 4-in hand driving, agility, breed shows, breeding stallion, broodmare, bull fighting, camping, cart, combined driving, cowboy dressage, cowboy racing, doma vaquero, field trials, gymkhana, harness racing, hazing, horse ball, marathon driving, mounted archery, mounted games, mounted patrol, mounted police, native costume, natural horsemanship, nurse mare, pacing, pack horse, parades, park, playday, polocrosse, ranch versatility, recipient broodmare, roadster, rodeo bronc, rodeo pickup horse, rodeo queen horse, roping, saddleseat, search and rescue, show hack, ski joring, steer roping, stock horse, sulky racing, team driving, team roping head horse, team roping heel horse, therapeutic riding, trial class competition, recreational trail riding, turnback horse, Western dressage, working equitation, hunt seat, show jumper, riding, pleasure, and bucking horse.
[0402] E91. The method of any one of E1-E90, wherein the likelihood that the offspring animal produced by each said breeding pair will have the one or more predetermined traits is at least 25%, 15%, 25%, 50%, 60%, 70%, 80%, 90%, 95%, 99%, or 0%.
[0403] E92. The method of any one of E54-E91, wherein the disease or non-disease condition is selected from a group consisting of anhidrosis, androgen insensitivity syndrome, cerebellar abiotrophy, curved ear tips, dwarfism, degenerative suspensory ligament disease, equine asthma, equine herpes virus risk, epistaxis risk, equine metabolic syndrome, laminitis, equine recurrent uveitis, equine viral arteritis susceptibility, foal immunodeficiency syndrome, gait transition, glycogen branching enzyme disorder, hereditary equine regional dermal asthenia, hoof wall separation disease, hydrocephalus, hyperkalemic periodic paralysis, immune-mediated myositis, impaired acrosomal reaction, junctional epidermolysis bullosa, kissing spines, lavender foal syndrome, lordosis, malignant hyperthermia, myotonia, navicular disease, osteochondritis dissecans, polysaccharide storage myopathy, recurrent laryngeal neuropathy, severe combined immunodeficiency, squamous cell carcinoma, tendinopathy, warmblood fragile foal syndrome, West Nile Virus susceptibility, wobbler syndrome, and behavioral abnormality.
[0404] E93. The method of E92, wherein the behavioral abnormality is selected from the group consisting of cribbing, teeth grinding, weaving, anxiety, depression, extreme aggression, extreme fearfulness, bucking, striking, biting, self-mutilating, and head shaking.
[0405] E94. The method of any one of E1-E93, wherein the one or more predetermined traits comprise at least 2 or more predetermined traits.
[0406] E95. The method of E94, wherein the one or more predetermined traits comprise at least 4 or more predetermined traits.
[0407] E96. The method of E95, wherein the one or more predetermined traits comprise at least 6 or more predetermined traits.
[0408] E97. The method of E96, wherein the one or more predetermined traits comprise at least 8 or more predetermined traits.
[0409] E98. The method of E97, wherein the one or more predetermined traits comprise at least 10 or more predetermined traits.
[0410] E99. The method of any one of E1-E98, wherein the computer-implemented database system comprises genetic and non-genetic information about the non-human animal, non-human parent animal, and/or non-human offspring animal.
[0411] E100. The method of any one of E1-E99, wherein the genetic testing comprises genotyping the non-human animal for any one of the following genetic markers:
   [0412] (a) agouti, black/red, brindle, champagne, cream, dominant, white, frame overo, grey, pearl, sabino, silver, splashed white, tobiano, and white spotting;
   [0413] (b) a curiosity gene that is a dopamine D4 receptor (DRD4) gene;
   [0414] (c) a speed gene that is a myostatin (MSTN) gene;
   [0415] (d) a gait gene that is a doublesex and mab-3-related transcription factor 3 (DMRT3) gene; and/or
   [0416] (e) a health gene selected from the group consisting of androgen receptor (AR), mutY DNA glycosylase (MUTYH), teashirt zinc finger homeobox 1 (TSHZ1), aggrecan (ACAN), family with sequence similarity 174 member A (FAM174A), interleukin 17A (IL17A), interleukin 17B (IL17B), chemokine (C-X-C motif) ligand 16 (CXCL16), solute carrier family 5 member 3
   [0417] (SLC5A3), glycogen branching enzyme (GBE1), peptidylprolyl isomerase B (PPIB), serpin family B member 11 (SERPINB11), beta-1,3-N-acetylgalactosaminyltransferase 2 (B3GALNT2), sodium voltage-gated channel alpha subunit 4 (SCN4A), myosin heavy chain 1 (MYH1), FKBP prolyl isomerase 6 (FKBP6), laminin subunit gamma 2 (LAMC2), myosin 5A (MYOSA), equine chromosome 20 (ECA20), ryanodine receptor 1 (RYR1), chloride voltage-gated channel 4 (CLCN4), glycogen synthase 1 (GYS1), equine chromosome 3 (ECA3), protein kinase DNA-activated catalytic subunit (DNAPK), damage specific DNA binding protein 2 (DDB2), procollagen-lysine, 2-oxoglutarate 5-dioxygenase 1 (PLOD1), 2′-5′-oligoadenylate synthetase 1 (OAS1), melanocyte inducing transcription factor (MITF), paired box (PAX), proto-oncogene receptor tyrosine kinase (KIT), high mobility group AT-hook 2 (HMGA2), zinc finger and AT-hook domain containing (ZFAT), ligand dependent nuclear receptor corepressor like (LCORL), non-SMC condensing I complex subunit G (NACPG), and LIM and SH3 protein 1 (LASP1).
[0418] E101. The method of any one of E1-E100, wherein the genetic testing comprises performing analysis of an entire genome of the non-human animal.
[0419] E102. The method of E101, wherein the analysis of an entire genome comprises genome wide association study (GWAS).
[0420] E103. The method of any one of E1-E102, wherein the non-human animal, non-human parent animal, or non-human offspring animal is selected from the group consisting of horse, cattle, sheep, dog, cat, camel, pig, goat, alpaca, donkey, llama, red fox, mouse, rat, ferret, non-human primate, rabbit, gerbil, hamster, chinchilla, or guinea pig.
[0421] E104. The method of any one of E1-E103, wherein the method further comprises generating a heterozygosity score for the non-human animal or non-human offspring animal based on a sample obtained from the non-human animal or non-human offspring animal, respectively.
[0422] E105. The method of any one of E1-E104, wherein the method further comprises generating an inbreeding coefficient (F) for the non-human animal or non-human offspring animal based on a sample obtained from the non-human animal or non-human offspring animal, respectively.
[0423] E106. The method of any one of E1-E105, wherein the method further comprises performing a breed composition analysis on a sample from the non-human animal or the non-human offspring animal.
[0424] E107. The method of any one of E1-E106, wherein the method further comprises performing an identity-by-descent analysis on a sample from the non-human animal or the non-human offspring animal.
[0425] E108. The method of any one of E1-E107, wherein the method further comprises generating a shared centimorgan (cM) value for the non-human animal or non-human offspring animal based on a sample obtained from the non-human animal or non-human offspring animal, respectively.
[0426] E109. The method of any one of E1-E108, wherein the method further comprises generating a kinship coefficient for the non-human animal or non-human offspring animal based on a sample obtained from the non-human animal or non-human offspring animal, respectively.
[0427] E110. The method of any one of E104-E109, wherein the sample is a biological sample
[0428] E111. The method of E110, wherein the biological sample is a hair sample, such as a hair sample comprising one or more hair follicles.

### OTHER EMBODIMENTS

[0429] All publications, patents, and patent applications mentioned in this specification are incorporated herein by reference to the same extent as if each independent publication or patent application was specifically and individually indicated to be incorporated by reference.

[0430] While the invention has been described in connection with specific embodiments thereof, it will be understood that it is capable of further modifications and this application is intended to cover any variations, uses, or adaptations for use in the compositions and methods of the invention following, in general, the principles for use in the compositions and methods of the invention and including such departures from the present disclosure that come within known or customary practice within the art to which the invention pertains and may be applied to the essential features hereinbefore set forth, and follows in the scope of the claims.

The application's sequence listing, which the Patent Office published only in electronic form, follows.

SEQUENCE LISTING (55 sequences)

SEQ ID NO: 1 - DNA, 2796 bp, Equus caballus
atggaggtgcagttagggctggggagggtctacccccggccaccgtccaagacctatcgaggagctttccagaacctgttccagagtgtgcgcgaagtgatccagaacccgggcccccggcaccctgaagccgcgagcgcagcacctcccggcgcccatttgcagcagcaacaggagaccagtcccaggcagcagcagcagcagggtgaggatggctcacctcaaacccagagcagaggccccacaggctacctggccctggaggaggaacagcagccttcacaacagccctcagcccccgagggccacccggagagcggtcgcgtcccagaggccagagccgccttggccgccggcaaggggctgcagcagcagccaccagcacctccggacgaggatgactcagctgccccatccacgttgtccctgctgggccccactttcccaggcttaagcagctgctccgccgatcttaaagacatactgagcgaagccggtaccatgcaactccttcagcagcagcagcaggaggtagtatcagaaggcagcagcagcgggagagcgagggaggcagccggggctcccacctgctccaaggacagttacctaggctgcagttcgaccatctcggacagtgccaaagagttgtgtaaggcagtgtcggtgtctatgggcttgggtgtggaggcattggagcatctgagccctggagaacagcttcggggagattgcatgtacgccccgctcctgggaggtccacccgctgtgcgtcccacttcttgcgccccgcgggcggaatgcaaaggttctctgctggataatggcccaggcaagggcaccgaagagactgctgaatattcccctttcaaggcaggttacgccaaagggctggatggcgagagcctgggctgctctggcagcggcgaagccgggggctccggaacgcttgagctgccatccactctgtctctctacaaacctggagcagtagacgaggcagcagtttatcagagtcgcgactactataactttccgctagccctgcccgggccgccgccccctgcgccgcctccccatcctcacgcccgcatcaagctggagaacccgctggactatggcagcgcctgggccgcggcggcgcaatgccgctatggggacttggcgggcctgcacggcgggggtgcagcgggaccgggctcgggctcaccctcagccgctgcctcctcttcctggcacactctcttcacagcggaagaaggccagctgtatgggccctgtagcgggggcgggggtggcagcgcaggcgaggcaggtactgtagccccctatggctacactcggccacctcaggggctggctggccaggaaggcgacttccccccacccgatgtgtggtatcccggcggcatggggagcagagtgccctatccaagtcccagttgtgtcaaaagcgagatgggtccctggatggagagctactccggaccttacggggacatgcgtttggagactgccagggatcatgttctgcccattgactattactttccaccccagaagacctgcctgatctgtggggacgaagcttctggctgtcactatggagctctcacttgtggaagctgcaaagtcttctttaaaagagccgctgaagggaaacagaagtacctatgtgccagcagaaatgattgcaccatcgataaattccgaaggaaaaattgtccatcttgtcgcctccggaaatgctatgaagcagggatgactctgggagcccggaagttaaagaaacttggtaatctgaaactacaggaggaaggggaggcttccagcgccaccagccccactgaggagccaacccagaagctgacggtgtcacacattgaaggctatgagtgtcagcccatctttctgaatgtcctggaagccattgagcctggcgtggtgtgtgctggacatgacaacaatcagccggactcctttgcagccttgctctctagcctcaatgaattgggtgaaagacagcttgtacatgtggtcaagtgggccaaggccttgcctggcttccgcaacttgcacgtggacgaccagatggcagtcattcagtactcctggatggggcttatggtgtttgccatgggctggcggtccttcaccaatgtcaactccaggatgctctacttcgcccctgacctggttttcaatgagtaccgcatgcacaagtcccggatgtacagccaatgtgtccgaatgaggcatctctctcaagaatttggatggctccaaatcaccccccaagaattcctgtgcatgaaggcactgctgctcttcagcattattccagtggatgggctgaaaaatcaaaaattctttgatgaacttcgaatgaactacatcaaggaacttgatcgtatcattgcgtgcaagagaaaaaatcccacatcctgctcaaggcgcttctaccaactcaccaagctcctggactctgtgcagcctattgcacgagagctgcatcagttcacttttgacctgctaatcaagtcccacatggtgagcgtggactttccagaaatgatggcagagatcatctctgtgcaagtgcccaagatcctttctggaaaagtcaagcccatctatttccacacgcagtgaagctttggaaacccccatttcctcacctcaccctactccccttttcagatatcttctgcctgttataactctgcactacttctctgcagtgccttggggaatttcctctattgatgtacagtctgtcatgaagatgttcctgagttc

SEQ ID NO: 2 - DNA, 2595 bp, Equus caballus
cccgctcgggcaggcgtttcagtcgctcgcggccggggagcccagcggagcttccagctgccccctctggctcgccggccggatcatcctcctggccccgccaaacaggcggggggagcggtccccgactgcggggccatggcagtagcctcctcgtcctccgccgccgctagccctgccgagtcgccggcttctgctcgagggacccccaccgcctccacaggctaagagccgttgccgcctccagccgggagggctactatgccccctctttgccgccgcctccccctcccgcccgtgcaggcccccctctggctgctcggtcccgcctcagtgtcaaaccggaagagaagtagacgtcaacaaaactttattatgcgtggagttccttcttaagagaagaaaaaagtgattattgagactatggatcggagcaaacggaattcaattgcaggatttcctccacgtgtggagcgtctggaagattttgaaggaggtggcggaggggatgggaacatgacccaggtgggaagggtttggccttcttcatatcgagctcttataagtgccttttccagactgacgcgtttagatgacttcacctgtgaaaaaatagggtctggcttcttctctgaagtgttcaaggtgcgccaccgagcttctggtcaggtgatggctcttaagatgaacacgttgaacagtaaccgggcgaacatgctgaaagaagtgcagctcatgaatagactctcccatcccaatatccttaggttcatgggtgtgtgtgtacatcaaggacaattgcatgcacttacagagtatatcaactctggaaacctggaacagttgctagacagtaacctgcatttgccctggactgtgagggtgaaactggcctatgatatagcagtgggtctccgctaccttcacttcaaaggcattttccatcgggacctcacgtctaaggccatcatgaagaaaccacgagcagctgtgggaagccgttgcaggaaacgggcatccagccaggagggaagggagaaatgtgcccgcagcagcacccaggccaagccttctgccccaaatggcctggccaggcggcaggaggaggtggaattgcaggcctccgtctccccgtaccatctattcagagacacagctgaggtcacagtcttccgggagagtctgctgagctggtacgaccgagagaagcgggacctaccctggagaaggcaggcagagggtgaagtggacccggacaggcgggcatatgctgtgtgggtctcagaggtcatgctgcagcagacccaggttgccacggtgatcaactattatacccgatggatgcagaagtggccaacactgcaggacctggccagtgcttcactggaggaggtgaaccagctctgggctggcctgggctactattctcgaggccggcggctgctgcagggagcccggaaggtggtagaggagctagggggccacatgccacgtacagcagagaccctccagcagctcctgcctggtgtggggcggtacacagccggagccattgcttccattgcctttggccaggcaaccggtgtggtggatggaaatgtagtacgggtgctctgccgtgtccgagccattggtgctgatcccagcagcacccttgtctcccagcagctctggagcctagcccagcagctggtagacccgacccggccaggggactttaaccaagcagccatggatctgggggccacagtgtgcaccccacagcgcccactctgcagccagtgcccactgcagagcctgtgccgggcacgccagagagtggagcgggagcagctgtcagcctcacagagcctgccaggcagtgctgatgtggaggagtgtgctcccaccactggacagtgccagctgtgcacgcctcccacagagccctgggaccagagcctgggcgtggccaactttcccagaaaggccagccgcaagtccctcagggaggagtgctctgccacctgtgttctggagcagcccagggcccttgggggtgcccgaattctgctggtacagaggccaaactcaggtctgctggcaggactgtgggagttcccatccgtgaccatggagccctcagagcagtgtcagcgcaaggccttgctgcaggaactgcagaattgggctgggccactcccagccacccgcctccagcacctggggcaggtggtccacatcttctctcacatcaagctgatatatcaagtatatggtctggccctggaaggacagaccccggtgaccgacacaccacctggcgctcgctggctgacccgggaggagtttcacaccgcagctgtctccacggccatgaaaaaggtgttccgcgtatacgagggccagcagccagggacctgtaagggttccagaagagccaccccgtctagccggaaaaagcccagcccaggccagcaagtcctggatagtttgtttcggccccacatccgcactgatacacccagcctcaagattgcagcccagtgacgcctctggaagaccctgccccctgagaatcctgttttttaataaagtgcttacttttgtagttgt

SEQ ID NO: 3 - DNA, 7373 bp, Equus caballus
caacttcccgctctctcccccagcccccggtcacacccttctacttcctgtctctgtgatgagcctgggttagcatggctggaagcaggttccagcagggctttgccgccatcccctacgtggacatgctgtcctgtggcacctgtcacggctgatacatctgaccgcaacttttgggtggaactgcccatgaccacttttgctggccttcctgtagatgaagacctgattttacaaacagggtattctaaagacagaattcatcttgaacccacgccactcacgtcactgagacgtggcccctgtgtggcagtgcaggtgcacgtcaggaacccgactctgaaacagatttcatctgtggtgcggccggggcagctcagggagcctctgtgcctcagtttcctcatgtggaggtggaaggtaatcacaggctttccccttatgggcttggcgagaggctaacacagttaaatgcggagcacttaagatagtggctggcggaacgtgagggctggataaatattacctattattattcggtgacactttaatccaaagcctcgtgctggtggagcagatattccatgggtatgaaatgtttacccaagaacaaggaaacgatttctttcaaaataatagtatattataagtattcccagataaatttctagtgtgctgagaaaagtcattctctctaggtgggtcattatcccagaatatattttattcctatttgggattggacttcagtgctgccacggaaaaaatgcttctgctgatgctagtgggctccttccctttctgcagagaatgtattcacctgtgcgtctttcctttcaggccaccattgcaggtatcggctctgccgatttccacttaggaacccactcccgtagggcagttaggtgttttttagtacatgctttctttgtccctctgaatattttctttccccttttttttatctcattaatttaaacacacccagcgtttctttccaagcagtttcatgaaccagcggaggcaggcggaggagagagacccggcgactctgggagacgttgggagtcgagggtctgagtttccctttgctggtcttagtgaggaaggttttcctgtgggagcgtttggaataggatttgtttcttttcttacactccatgcacgaatctttgattttaagaccttttcctagaaatggtcgaacctcgtatgttctcccagaatcccacctgcagtcagagcttctggaagtgtggtctcaggatcagactcagggcgccacacgcctccttgcaggagaactcaaaagaggaattgttcttagactaactgggaattgttgtttatgtgaaatttctaaaaagggaagcaatgtcttgtttaagggctctgagtgccccctaattatgtggagcatccttccagcctctgcttcagatctcagggaaaattaatgaaagaatgtcagggctcaaactggccctgtgactccagcccctcttccatattttgagccaggagactgtatctccagcttcacttgaggatacaaatgaagagtgagatccactcacctgctgaattcacttccccgggtgcccccaggcatcctgggcccgcagcctacctgagccccatctcccgagtgctcaataatgcagcaggattttgctccaccaaagtgtcacctgtctaggtgagttgtgccagtgtctatctgaagtgacagccatctttgagtaccagcatctttaactgacttctctttcatcatttgtgttggaaaggtaacattttcgacagggttgtttcctcctcccccgttcttgtttctggcccctccctccgcctgctccctcgccccctccccactctcttagtgcacctgatcaaaacgttaccactgacaaaggtttccttctccaaattaaatgagtccaactagcctgggaattttcatgaagaaagcaagtgaagtgctgatgtgcgaagttaatgaatctggaaacagagagaacattattgagcctggatgatatgatgtagcagcattcctcctcacgcttcctgtaaagaatatatggaagtcagttatgtggcgtgattctaacatctgtcctaccccataatggtaatttgtataagtaatggaaacaggttaaatacttccattctaatgttgccagcagggatgaaaatgaacatttcaatgaaatcatctcgacagagcggggcgggggcctggactgattcatctccactcccgttggtgatgggagccctaatgagaaggcttgaatgtatagtttatcagatgcaagaggaagagcaagtaaatctctgagattagaatcctgcagacctgctccgcatgcggggcgcggtggcctccgtcgcagacctctgctaataacacgctcttttcattctgagggaggggcagagggagagggatgtggagggccagggttttttctcctctcgaatgggctgcctgcaagggttatcttcagctggtaaacccaggggtggtcttatgatgtcgcttagcaccctgtccagaaaacgtggggggagggaggagagcttggcattcttcgctttcctgtaattataaatcatccactttcagaatggccttctctttgcctaaaaagtctctttacttccttaggggcccgtgtgaagaagagccatttgatttgaaccactggtgctatttagcatgttttaaagattggagctcaattccttttcactgtacaccctgtacatgttactccacttccaggggaaatgccaggtcttctcgcaagaggaatgctcagtcatgccaagtgtcctgtaacgtcgatgtaaattcaacttatgttcctgaggaagaactgaaggcagcagaaatagatgaagaaaatgtggaggaggatgggctgtccctgggcatgcaggagggcgactatgtgtgcaatgaagagacagagatcaaagaggcccagagctaccagaactcccccgtcagcactgcgacgaaccaggacgccggctatgggtcgcctttcagcgaaaacagcgaccagctagcccatttcaaaagctcttcctccagagaagagaaagaggatccgcagggtccagacagcatctcctacccccaggacagcttggcacaaatcaaggctgtgtatgcaaacttattctcggagtcctgctggtccagcttagctctggatttaaagaagtccagttccaccaccagcaacaacgatgtcggccagaaggagggctccactcccgcccctacgccccccaccagtaccacggggaccacggggaccaccgcgagcacacccagctccagctctggctccagctcgggctccagcaccagcaccagcaccagcagcagtggcggctcgggctatgactggcatcaggcggccctggccaagacgctgcagcagacgtcctcctacgggctgctccccgagcccagccttttcagcaccgtgcagctataccggcagaacaacaaactctacggctctgtgttcaccggcgccagcaagttccggtgcaaagactgcagcgctgcctacgacacgctggtggagctgacggtgcacatgaacgagacggggcactaccgtgacgacaacagggacaaggattctgagaagaccaagcggtggtccaagcccaggaagcgctccctgatggagatggaagggaaggaggacgcccagaaagtgctcaagtgcatgtactgcggccactcttttgagtccttgcaagacctgagcgtccacatgatcaagacaaagcattaccagaaagtgcctctgaaggagccagtaccagccatcaccaaactggtcccttctaccaaaaagcgagcgctccaggacctggtatccccttgttctcccgagccagcaggaatcgctgcggacgctgcactcagtgagtccgccaaggatcagaagactgccaacccctacgtgacgcccaacaaccgctatggctaccagaacggtgccagctacacctggcagttcgaggcccgcaaagcacagatcctcaagtgcatggagtgcggcagctcccacgacaccttgcagcagctcaccgcccacatgatggtcaccggccacttcttgaaagtgaccacctctgcctccaagaaagggaagcagctggtgctggaccctgtagtggaagagaagatccagtccatacctctgcccccgaccacgcacacccggctccccgcctcccacatcaaaaagcagcctgactctcctgcgggctccacgacctcggaagagaagaaggagccagagaaggagaaggcaccggccgccagtgacgcggagaagaagatcaaggaggagagcgaggatggctccgagaagtttgagcctaccaccctctatcagtacctccgtgaggaggacctggacgatagccccaagggcggggtggacattctgaagtccctagaaaacacggtctccaccgccatcagcaaagcccagaacggcgcgccctcgtggggcggctaccccagcatccacgcggcctaccagctgcctggcaccgtgaagccgctgccggcagtgcagagcgtgcagatacagccgtcctacgccagcagcgtgaagtcgctgtcctcagagcacagtgccctcctgcactccccggggagcctcacgccaccgccccacaagagcaacgtgtcggccatggaggagctggtggagaaggtcactggcaaggtcagtgtgaagaaggaggagaagcctgcagagaaggagaggggctccccggccaaggccgtgtcccccgtggccaaagagaataaagatttccctagaacggaggaagtcagcggcaaaccgcagcagaggaagggccccgacacggaggtgggcaaggccaagagagagggcgcggtggacgcccacaccccaaatggcaccgagcctctcaaagccaaagtcaccaatggctgcagtaccctggggatcatcacggaccactccccggagccctccttcatcagcccgctgagcgcgctgcagtccatcatgaacacccaccttggcaaggtgtccaagcccgtgagcccctcgctcgacccactggccatgctgtacaaaatcagcaacagcatgctagacaatcccgtctaccccgccacgcccggcaagcaggccgacgccatcgaccgctactactacgagaacagcgaccagcccatcgacctgaccaagtccaaaagcaagcccctggtgtccagcgcagccgactccgtctcgtcacctctccgggagagcgccctgatggacatctctgacatggtgaaaaacctcacgggccggctgacccccaagtcctccacgccctccacggtgtcggagaaatcggacgccgacggcagcagcttcgaggaggcgctggacgagctgtcgcccgttcacaagaggaagggacgacagtccaactggaacccccagcacctgctcatcctgcaggcccagttcgcctcgagcctgcgggagacctcggaaggtaagtacatcatgtcggacctgggccctcaggagcgggtgcacatctccaagtttaccgggctctccatgaccaccatcagccactggctggccaacgtgaagtaccagctgaggaggacaggggggacgaagttcctcaagaacctggacacagggcatcctgttttcttttgcaacgattgtgcctctcagttcagaactgcttctacgtacataaatcatctagagacacatttaggcttcagcttgaaggatctctccaagctgccactaaatcagattcaagaacagcagaatgtctcgaaggtcctggctaacaaagctctgggccccgtgggggccgccgaggacgacttgggctccacattccaatgtaagctctgcaaccggacttttgcgagcaagcacgcggtcaaactgcaccttagtaagacccacggcaagtccccggaggaccacctgatctatgtgacagagttggaaaaacagtagcgtccaggtatgcaagggaccccggcacattgcactaacgtcctcgtactgcactaggcctggcctgagcctccgaaatcagcctttcctttgttgccgaactgcctgtctggaccttggtttttcttacacatattttgtagttatatttatatgctctttgtccgattgtgcatgttatttttctttttccgtgagtcaaagtctgacctttattttcaacatctgttcttgatgttaagctatcttttgtaggaaatagtggggcacactactcagagacatttatttagcaggaaagaaagacacaaataacaatgacaaaaagacatcctaaaattacaaagtggccatgacaataaaggtcacagaacctagtagtgttgaatttaaccctttgaggactgtaattgcatttctgtgcctttcactcaaaaaaaaaagaaaaaaaggcttaaaggcatttcattcagatcaaaagctgtgtcagacacaaaacttatttaataattaaaaaatgagcttttatatgcagaactggtttgtgaaggaaacatgcatgcagctgttggaagatagaaagttgtctaggactcgtggggttagaaagccacaactttacacgtttaaaacaaaaagcaaaacaaaaagaactaacaacagcaaacaccccatttgccactatgcccaaaccctctggatgctgaaaaatgccatttttggcaaaaaaaaaaaaacagtatgcaagctattatttaaaaatgtgtaaaaatgctatttcctttttcctgtaaaatactgcggtttatagttatttacaaatgtaagctttggtacaagctgacctttctatagcgtgctgcattggtaaatgaaaaaaatcgggcacacgtcggagtcctttccttgtaaattgccagcatcagcttaaaaactcctacatgttacatatcgtaccattttaatctattcaactttctttgtaccttctggctgtatgctttctcttttaactttttatattgtcattttatattaaatttctgtgtatataatgtaaaaccacaatttttgaataaaatttagttcctgcagcttgatttaaatagagaaattttactggcacctgcatctttccagatgcatgtatatcagacaaaaataaataaatgaaacgaagcaagcaatgcactattaattatacattttgatgttctatcattaatattgtacagtacattttggttcacacaattaaatccactgttttctcaaatgtaaaataaagccacatgcagtccttga

SEQ ID NO: 4 - DNA, 8728 bp, Equus caballus
ctaccttcccgccgctccagagggggctcgcagagctgaggacgcgcgcggcgctgctcaaggtctctctctccgcaccctcgccggccggcgtctgacccgggggccagggggctccgggcacctttcactgtcccttcactcggcctgccgggactctgcaacccagacgcggccgctgcggccaccgacctaggggacctgcggacaggacgccggcaggaggaggggtgcgccgcgcccgcgcagagcgtctccccagctgcgcagcgagacccgggcctcccggccccacgagcccccggctgccgctccaggtgtatgggactgaagttcttggagaacggagtccaactcttcaaggtgaactatgaccactttactcttggcgtttgtgactctgagggtcatcacagcggccatctcagtagacgtttcagaccctgacaactcgctgagtgtcagcatccccgaaccatccccgctgcgggtcctcctggggacctccctcaccatcccctgctatttcatccaccccactcaccctgtgaccaccgccccctccaccgcccccctcgccccgagaatcaagtggagccgcatttccaaggagaaggaggtggtgctgctggtggccacggaagggcaggtgcgggtcaacagcgcctaccaagacagggtctcgctgcccaactacccagccatcccgaccgacgccaccttggaactccagaacctgcgctccaatgactctggcatctatcgctgcgaggtgatgcacggcatcgaggacagcgaggccaccctagaggtcgtggtgaaaggcatcgtgttccattacagagccatctccacgcgctacaccctggacttcgacagggcgcagcgggcctgcctgcagaacagcgccatcatcgccacgcccgagcagctgcaggccgcctatgaggacggcttccaccagtgcgacgccggctggctggccgaccagactgtcaggtatcccatccacttgccccgggaaggctgctatggggacaaggatgagtttcccggcgtgaggacctacggcatccgtgacaccaatgagacctacgacgtgtactgctttgccgaggagatggagggtgaggtcttttacgcaacgtctccggagaagttcaccttccacgaggcagccaacgagtgccggcgcctgggtgcccggctggccaccaccggccagctctacctggcctggcagagcggcatggacatgtgcagcgccggctggctggccgaccgcagcgtgcgctaccccatctccaaggcccggcccaactgcgggggcaacctcctgggcgtgaggaccgtctacctgcacgccaaccagaccggctaccccgacccctcatcgcgctacgacgccatctgctacacaggtgaagactttgtggacatcccagaaaacttcttcgctgtgagtggcgaggaggacatcaccatccagacggtgacctggccggatgtggagatgccactgccacaaaacatcaccgagggtgaagctcgaggcaatgtgatcctcacagtgaaacccatctttggcgtctcccccaccatcctggagcctggggagcccttcacgtctgtccctggcgtggggaccaccgccttccccgaggcggagaacgagactggagcggccaccaggccctggggcgttccggaggagtccacacctggcctgggccccatcacagccttcaccagcgaggaccttgtggtacaggtgaccacagctcctgaggtccctgggcagccacgattgccagggggtgttgtgttccactaccgcccgggctccgaccgatactctctgacctttgaggaggcacagcaggcctgcctgcagacaggggcggtcatcgcctcgcccgagcagctccaggccgcctacgaagcgggctacgagcagtgtgacgccggctggctgagtgaccagaccgtcagataccccattgtgagcccccggaccccatgtgtgggcgacatggacagcagcccgggggtcaggacctacggcgtgcggccctcatcggaaacctatgatgtctactgctacgtggacaggctcgagggggaggtgttcttcgccacacgcctggagcagttcaccttccgggaagccctggagttctgtgggtcccacaacgccaccctggccaccacgggccagctctatgccgcctggagccgcggcctggacaagtgctacgccggctggctggcagacggcagcctgcgctaccccatcgtcaccccacgacccgcctgtggtggggacaagccaggcgtgaggaccgtctacctctaccccaaccagacaggcctcccggacccactgtcccggcaccacgccttctgcttccgaggtgtctcagtggcgccgtctccaggagaagaggaggctggcacgcccacactgccctcaggcgtggaggactggctcgtgacccaagtggcgcctggcgtggctgctgtccccttaggggaggagacgacagcaattccagccttcaccgttgagccagaaaaccagacagaatgggaaccagcctacacgccactggctgcatccccactgccagggattcctcctacgtggcctcccacaagtgcagcaacagaggagagcacagaaggcccctgggccacggaagtgccctcggcctcggagaagccatccccctcggaggagccgtccacgctttcagccccagtgcccatcgagacggagctgccaagccctggggagccatcgggggtgcctgaagtcagcggtgacttcacaggcagtggagaagtttcaggacacctggacttcagggggcagccctcagagggaagtgtaagtggactgccctctggagaccttgactccagtggtcttatctctgcagtgggctcaggcttgcatgtgggcagtggactggcctcaggagatgaagatagaattaggtggtccacgactcctgcagttggctggctgccctctggaagcgagggcccagagcccactgcttctggagcagaggacctcagtggacttccttctggaggagaggttcatctagagcccactgcctctggagtagaggatctcagtggacttccttctggaggagagatccatctagagcccactgcctctggagtagaggaccttggtgaacttccttctggaggagagatccatctcgagcccactgcctctggagtggaggaccttggtgaacttccttctggaggagaggttcatgttgagcccactgcctctggagtagaggatatcagtggatttccttctggaggagaggttcatgttgagcccactgcctctggagtagaggatctcagtggacttccttctggaggagagattcatctagagcccactgcctctggagtagaggaccttggtggacttccttctggagaagagattcatctagagcccactgcctctggagtagaggatatcagtggatttccttctggagaagaggttcatcttgagcccactgcccctggaatagaggatctcagtggacttccttctggaggagagattcatgttgagcccacagcctctggagtagaggatatcagtggatttccttctggagaagaggttcatcttgagcccactgcctctggagtagaggacctcggtggacttccttctggaggagagatccatttagagcccactgcctctggagtggaggacctcggtggacttccttctggaggagagattcatcttgagcccactgcctctggagtagaggacctcggtggacttccttctggcggagagattcatctggagactactccctctggagcagaggaccttggtggacttccttctggaggagagatccatctcgagcccactgcctctggagtagaggacctcggtggacttccttctggaggagagatccatctcgagaccactccctctggagtagaggacctcagtggacttccttctggaggagagatccatctcgagcccactgcctctggagtagaggacctcggtggacttccttctggaggagagatccatctcgagcccactgcctctggagtagaggacctcggtggacttccttctggaggagagattcatctagagcccactccctctgaagtagaggacctcggtggacttccttctggaggagagattcatctcgagcccactgcctctggagtagaggacctcggtggacttccttctggaggagagattcatctcgagcccactgcctctggagtagaggacctcggtggacttccttctggaggagagattcatctcgagcccactgcctctggagtagaggacctcggtggacttccttctggaggagagattcatctagagcccactgcctctggagtagaggacctcggtggacttccttctggaggagaaatccatctcgagcccactgcctctggagtagaggacctcggtggacttccttctggaggagaggttcatcttgagcccactgcctctggagtagaagacctcggtggacttccttctggaggagagatccatttagagcccactgcctctggagtagaggacctcggtggacttccttctggaggagagattcatcttgagcccactgcctctggagtagaggaccttggtggacttccttccggcggagagattcatctggagaccactccctctggagcagaggaccttggtggacttccttctggaggagagatccatctcgagcccactgcctccggagtagaggacctcagtggacttccttctggagaagaggtccatcttgagcccactgcctctggagtagaggacctcggtggacttccttctggaggagagatccatctagagcccactgcctctggagtagaggacctcggtggacttccttctggaggagagatccacctagagcccactgcctctggagtagaggatatcagtggacttccttctggaggagagattcatctagagaccactccctccggagcagaggaccttggtgaacttccttctggaggagaggtccatctcgagcccactgcctctggagtagaagacctcggtggacttccttctggaggagaaatccatctcgagcccactgcctccggagtagaggacctcggtggacttccttctggagaagagattcatctagagcccactccctccggagcagaggaccttggtggacttccttctggaggagagatccatctcgagcccactccctctggagtagaggaccttggtggacttccttctggaggagaggtccatctcgagcccactgcctctggcatagaggaccttggtggacttccttctggaggagagatccatctcgagcccactgcctctggagtagaggaccttggtggacttccttctggaggagaggtccatctcgagcccactgcctctggagtagaggacctcagtggacttccttctggaatggaaggtctagagacctctgcttctggagctgaggaccttagtgggttgccttctggaagagaggacttgtttgggtcagcttctggagccttggactttggcagaataccttctggaagtgggcaagctcctgaagcaagtggccttccctctggatttagtggtgagtattctggggtggaccttggaagtggcccatcctctggcctgccggactttagtggacttccgtctgggttcccaaccgtctccctagtggatacgacattggtggaagtcgtcacagccaccactgcaggtcaactggaagggaggggaacgattggcatcagtggtgctggagaaacatctggactgcccttaagcgagctggacattagtgggggagctagtggactcccttcaggagctgaactcagtggccaggcatctgggtctcctgacatcagtggggaaacatctggactctttggtgtcagtggacagccatcagggtttcctgacatcagtgggggaacatctgggctttttgaggtcagcgggcagccatcaggattttctggggaaacatctggagtgactgagtttagtggactgtcctctggacaaccagatgtcagtggagaagcttctggagttctttttggcagtggtcaaccatttggcataaccgacctgagtggaggagcatccggggtccatgatctcagtgggcagccatcggggttgccggggttcagtgggacaacatctggaatccatgacctggtttccagtgccatgagtggcagtggtgaaccttctggcattacgtttgtggacaccagtttggtcgaagtgaccccgactccgtttaaagaagaagaaggtttgggatccgtggaactcagcgggctcccttcaggggacgcagacctctcgggcacatctgggagagcagatgtcagtggacaatcttctggagcacctgattccagtgggcttacatcccagcctccagaactcagtggcctgccaagtggcgtcgctgaggtcagtggagaatcctctggagctgagactgggagcagcctgccctcgggagcctacgacggcagtggacttccctctggtctccccactgtctcccttgtagacagaactttggtggaatctgtaacccaggctccaacagcccaagaagcaggagaagggccttcgggcattttggaactcagtggtgcccattctggagcaccggccgtgtctggagaccattcgggattttcggacttaagcgggctgccgtcagggctggtggagcccagtggagagccatcgagtactccacatttcagtggggacttctcgggcaccattgatgtaagtggggcatcctcggcggccacgagcaccagtggggaagcctcaggacttccagaaattactttaatcacttctgagttcgtggagggtgttactgaaccaactgtttcccaggaactcggccagagaccccctgtgacattcaccccccagcttgttgagtccagtggagaagcctctgcgtctggagaagccggtggagctacgcccgggttccccggggctggagtggaagcatcctcagtcccagaatccggccatgagacgtctgcctatcctgaggccggggtggtggcgtctgctgcccccgaggccagcggaggagcttctgggtcccctgatctgagtgcagccacctccgcctcccgtgaagctgacctggacggaggctcaggcctgggcgtgagcggcagcacgtccccctttcacgaaggccccagggagggctcagccagcccggaggccagtggagtgtcaaccaccacctaccacgttggcacagaggcatcaggctggccttcagccgcccccgcggcttccagagacaggactgacagcagcggagacccgtctggccacacctcgggcccagatgtggtcctgagcaccagcctcccagagtctgagtggaccccgcagatgcagcgccctgcagaggcgctcctagaaatcgagtcctcaagccccctgtactcaggagaagagaccccaacagccgaaacagccgtctccccgacagaggcttccatcccagcttctccaggaggaccaggtgtatcggagacagccgtcacagaccaggagctgtgtgagaatggctggaccaagttccagggccactgttaccgctactttcccgaccgcgagacctgggtggacgccgagagcaggtgtcgggagcagcagtcacacctgagcagcatcgtcactcccgaggagcaggagtttgtcaacaacaatgcccaagactaccagtggatcggcctgaatgacaggaccatcgaaggggacttccgctggtcagatggacactccttgcaatttgagaactggcgccccaaccagcccgacaacttcttcacggccggcgaggactgcgtggtgatgatctggcacgagaagggcgagtggaacgacgtgccctgcaattaccagctgcccttcacgtgtaaaaagggcacggtggcctgcggagacccccctgtggtggagcacgccaggacctttgggcggaagaaggcgcggtacgagatcaactccctggtgcggtaccagtgcaccgagggctttgtccagcgccacgtgcccaccatccgctgccagcccagcggacagtgggaggagccccggatcacctgcacagaccccgccagctacaagcgcagactacagaagcggagctcccgggccccacggaggagccgccccagcacggcccactgaaaggggcttcccagacgcgcccaggatgctgagcccaggagccttgccaggctgacatcccacacggatggtgtcctcttcttgtcgctttctgtcctctaaggaattccattaaagaaggaaaaacataaatcccaccttgtgtatgcacccacccccccacccccagatcaccgacacttcgtctgattttctccctcaaatgccgaagcacagcaaatgtatcgtaacccgtggactgagtttagagacttttcttcaatctcccgatgtgcctttccaaggaccagtgcagggacagggggagaaggggaggggttaagttaaataaagaagattattttttgtttcctgacttta

SEQ ID NO: 5 - DNA, 1182 bp, Equus caballus
gcgggccctgcggctcccgcgtggtgagagggcggtctggggacaatggaggccccacgctgcagctgctgccccagccgcctcctggcctccgccctcctgctgctgctgctgctgccagggttcagagggcctttggcggtgctgctgcaggcggccgaggctgcgccggaccccgggcctccggaccatgggtcgcggaccctgccgcctctgccgcccggccccaccgccgcccagtccccaggccgcgctccggccgaagccgcggggccgcggggcgctgagagcagcaatggcagcagccccggggcggggcttgcggccagcgacctaggagggaaggcgggggaagaaggctcagtgggtggcggtctcgctgtgagccccaaccccagcgataagcccatgacccagcgggcgctgaccgtgttgatggtggtgagcggcgcggtgctggtgtacttcgtcgtcaggacggtcaggatgagaagaagaaaccgaaagactaggagatacggagttttggacactaacatagaaaacatggaattgacacctttagaacaagatgatgaggatgatgataacacattgtttgatgccaatcatcctcgaagataagaatgtgccttttggtgagaggacttcatctttctacaatgaagagagaatttctatgtttaaggaataagaagccactttatcaatggggggggggtatttaagttacatatattatgacaacctttaatttgttgttgaagtaaatactgtatcattttgttatgtctttgtatgtatagaagtgctcttaatgggctcagagttcttggaagtaaactatactataatagaaacctgtttgaaagttactttaaagcaagatcttttctgatcagtttttgcttattgcttaccatgttattgtaaactgttttacccattaatcagttaatgttatttttgggggaattttttgctggttaattattttttgctggaaatgtaagtcccaacaaccaactggtatgtaaaaataatttaaaaatttctttaaaaggatatgtttcccatttttgtggggaaaagaagccaaatttactactttgtgtttaggttttttaaatattaataaatgtctgagttgtgtgcaaaacaataaatatgatttacaattct

SEQ ID NO: 6 - DNA, 462 bp, Equus caballus
atggctcctctgagaacttcatccgtgtcactgctgctgctgctgagtctggtggctatcgtgaaggcgggaatagtaatcccacaaaatccggaatgcccgaacactggggacaagaacttccctcagaatgtgaagatcaacctaaacgtccttaaccggaaaacgaattccagaagggcctcagattaccacaaccgctccacctccccttggaatctccaccgcaacgaggaccctgagagatacccctctgtgatctgggaggcgaagtgccgccacctgggctgtgtcaatgccgaagggaaggtagacttccacatgaactccgtccccatccagcaagagatcctggtcctgcgcagggaatctcagaactgcccccactccttccagctggagaagatgctggtggccgtgggctgcacctgcgtcacccccattgtccgccacatgggttaa

SEQ ID NO: 7 - DNA, 1535 bp, Equus caballus
agagtgagctgagcgcctggccagcgcgcgaactttctcgcgggcatcaccccggccatgtgacaggtccggttgcgccaggacccctacgggggaagtgaaagcggctcggaggagaggcgaggtgaagcggctcacctgcatccccaggtccgcggagtgacctggggcgggcgcaccggcgtccctgaacccgactgcaatcagccgtccggccactggctgcctgtcccgcctcgctccgcagcctgacttttctttcgctttctttagacattcctggccgccccgtcgacgaaggctctgggcccgacgtgggcgaaggggctccgcctccgggggtttccccgccgcgggaggcgggcggacgcgcggggtccccggggctggccgcgctgtctgttctaggcggcgcagcttggggacggagggcgccgccacctcgcgccccctcttcgaccgagactcggtgcccttggccgcagtcggccccggaatctccggcggagcgggggatcgaggcgaaagcctgagaaatcagctggacatcttgctctcgagcctgtctgagagtcagacggcgaggcggcgccgagatgaggcggcgccggggacccctgcccttcgagctcctgctcctgctagcgttgctgactctgcaaggggatggcaacgagggcagcatcgctggaagttgtcgctgtaatacaagatatccgtccgactcccctccggcggttgactttatggaacatttccgaaaacaactgagaggctatgatcgctgtggttcgtacgtcaggtttcagctacattcgcggagtgtgtgcgggggcagcaaagaccagtgggttcatgaattgataagctgcttcgatcgcaaagaatgtggacgtggtaaccttgggagagtggcccaccgggagcatttacctccccccagcactcaggctcctgaacccacagaaagggcatcttcagacgtagtcacccctgcccagacatacctgccatctaccctgcagcctatccagcagtccacccgtccagcagcaacaccgtccttggacaaaaacctcatccatgccaatgaaaccactgcctccactttgggccacagcctagtgtctgggcccgaggctggggagaaccagaagcagctgaaagaacatgtgggttctgcaattgggacatcagttacagtggcagtgccgtccctcttggccatcgtcttcttcctcacaggagtcctcctctgtgtgttatgtaagaagagggagaagacactgcggccctctccagatttgcaggctcattatgaacgtgtggccccagactgatgcttgagctaagaatggaagcttgtgacggtagaaattgtgacttattcagcaccatatgcattcaatacactctaagtctctagcacatggcaggcactctgtatgtatgtttaatgttaatacattaacactatgtatgtatctgtatgtatgctaatgtttaatatacttacttccctctcttagacctta

SEQ ID NO: 8 - DNA, 301 bp, Equus caballus
  misc_feature (152)..(152): n is a or t
aggtgagaggctgcgatggggcggtgggttggaggctaagtaatagctgggggagccctttggcgtgggaacctgtgcagaccgtcgctgtctctctcaggggatggcaacgagggcagcatcgctggaagttgtcgctgtaatacaagatntccgtccgactcccctccggcggttgactttatggaacatttccgaaaacaactgagaggctatgatcgctgtggttcgtacgtcaggtaatcttaaccccccacaccccccaccccgggaagacagcgcctctgggaccctctctggt

SEQ ID NO: 9 - DNA, 392 bp, Equus caballus
  misc_feature (195)..(195): n is g or c
  misc_feature (198)..(198): n is t or g
  misc_feature (204)..(204): n is g or a
cgaccagaccctggtctaggtgagaggctgcgatggggcggtgggttggaggctaagtaatagctgggggagccctttggcgtgggaacctgtgcagaccgtcgctgtctctctcaggggatggcaacgagggcagcatcgctggaagttgtcgctgtaatacaagatatccgtccgactcccctccggcggttnacnttatgnaacatttccgaaaacaactgagaggctatgatcgctgtggttcgtacgtcaggtaatcttaaccccccacaccccccaccccgggaagacagcgcctctgggaccctctctggtcaaacttgaactccttctgggaggacctagccccctctccggcttataattgccctgattctcccagttcacct

SEQ ID NO: 10 - DNA, 392 bp, Equus caballus; identical to SEQ ID NO: 9
  misc_feature (195)..(195): n is g or c
  misc_feature (198)..(198): n is t or g
  misc_feature (204)..(204): n is g or a

SEQ ID NO: 11 - DNA, 392 bp, Equus caballus; identical to SEQ ID NO: 9
  misc_feature (195)..(195): n is g or c
  misc_feature (198)..(198): n is t or g
  misc_feature (204)..(204): n is g or a

SEQ ID NO: 12 - DNA, 2157 bp, Equus caballus
atgagggctgtactggagacagcagacattgccatagtggccctgtattttatcctggtcatgtgcattggtttttttgccatgtggaaatctaatagaagcaccgtgagtggatacttcctggcggggcgctctatgacctgggtagcgattggtgcctctctgtttgtgagcaatattgggagtgagcacttcattgggctggcaggatctggagctgcaagtggatttgcagtgggcgcatgggaattcaatgccttactgcttttgcaacttttgggatgggtgttcatcccgatttacatccggtcaggggtatacaccatgcctgaatacttgtccaagcgatttggtggccataggattcaggtctattttgcagccttgtctctgattctctatatcttcaccaagctctcagtggatttgtattcaggtgccctctttatccaagagtctttgggttggaacctttatgtgtctgttatcctgctcattggcatgactgctttgctgactgtcaccggaggccttgttgcagtgatctacacagacactctacaggctctactcatgatcgttggggcactcacgcttatgattattagcatgatggagattggcgggtttgaggaagttaagagaaggtacatgttggcctcacccaatgtcacttccatcttgttgacatacaacctttccaacacaaattcttgtaatgtccaccctaagacagatgcactgaaaatgttgcggaatccaacagatgaagatgttccttggcctggattcgttcttgggcagaccccagcttcagtatggtactggtgtgctgaccaagtcatcgtgcagagggtcctagcggctaaaaacattgctcatgccaaaggctctactcttatggctggcttcttaaagcttctaccaatgtttatcatagttgtcccaggaatgatttccaggatactgtttgctgatgatatagcttgcatcaacccagagcactgcatgcaagtgtgtggaagcagagctgggtgctctaatattgcttacccacgcctggtgatgaagctggttcccgtgggcctccggggcttaatgatggcagtgatgattgcggctctgatgagtgacttggactctatctttaacagtgccagtaccatattcaccctcgatgtatacaaactcatccgcaagagtgcaagctcccgggaactcatgattgtggggaggatatttgtggcttttatggtggtgatcagcattgcatgggtgccaatcatcgtggagatgcaaggaggccagatgtacctttacattcaggaggtagcagattacctgacgcccccggttgcggccctgttccttctgtccattttctggaagcgctgcaatgaacaaggggctttctatggtggaatggccggctttattcttggagcagtccgtttgacactagcctttgcctaccgtgccccagaatgtgaccaacctgataacaggccaggcttcatcaaagacatccattacatgtatgtggccacagcattgttttgggtcacaggactcattactgtaattgttagccttctcacgccacctcccacgaaggaacagattcgtaccaccaccttttggtctaagaagagcgtggtggtgaaggagagctgctccccaaaagacgaaccgtacaagatgcaagagaagagcattctgagatgcagtgagaatagtgagtccatcaaccacatcattcccaatgggaaatctgaagatagcattaagggccttcagccggaagatgttaatctgttggtgacctgcagagaggagggcaacccagtggcttccttaggtcattcagaagcagaaacaccagtagatgcttattccaatgggcaagcagctctcatgggtgagaaagagagaaagaaagaaacagaggatggaagccggtactggaagttcatagattggttctgtggctttaaaagtaagagcctcagcaagaggagtctcagagacctgatggaggaggaggctgtttgtttacagatgctggaagagcctccgcaagttaaactaatactaaatattggacttgttgctgtgtgttcacttggaattttcatgtttgtttatttctccttgtga

SEQ ID NO: 13 - DNA, 2196 bp, Equus caballus
ccgccgccagcccgccagctcttccgggagctcagggcatgaacggctacggttccccctacctgtacatgggcggcccggtgtcgcagccgccgcgggcgcccttgcagcgcacgcccaagtgcgcgcgctgccgcaaccacggggtgctgtcctggctcaagggtcacaagcgctactgccgcttcaaggactgcacctgcgagaagtgcatcctcatcatcgagcggcagagggtcatggcggcgcaggtggcgctgcgccggcagcaagctaacgagagcctcgagagcctcattcccgactcgctgcgtgctctgcccggccccccgccgccgggggacgccgccgctgccgccccgcagccgccgcccacctcgcagccgtctcagccgccgccgccgcagcgtcccgccgccgagttggctgcggccgccgcgctgcgctgggccaccgagccgcagcccggggcgctgcaggcgcagctcgccaagccagatttgactgaggagcgacttggggacggcagctccgcagacaacacagagaccttcagcgacaaagacaccgaccagaggagctccccagatgtggtgaaaagtaagggctgcttcaccccggagagccccgaggtcgtgtctgtggatgaaggcgggtatgcggtccagaagaacggaggcacctccgagagccgccccgacagtcccaagtaccacggggaacagaatcacctcctgatcgagggcccctcggggaccgtttctctgcccttcagcttgaaagccaacagaccgcccctggaagtgttaaaaaaaatcttccccaaccagaagcccacggtgctggagctcatcctgaagggctgtgggggcgacctggtgagcgccgtggaggtcctcctctccagccgctcctcggcctcggccgccgaccgaacttcggcagagcccgagagcctcgtgttgccctccaacgggcacatctttgaacacaccttgagctcataccccatctcctcttccaaatggtccgtgggatcggccttcagggtcccagacacgttgaggttttccgcagactctagtaacgttgtccccaaccccttggccgtgcccctgcagcatcctttcccccagccgccccggtaccctctgatgctgaggaatactttggcaagaaaccagtcgagccccttcctgcccaatgatgtcaccctgtggaacaccatgacgctgcagcagcagtaccagctgaggtcccagtacgtcagccctttccccgggagctcgcccagcgtcttcagaagctcgcctgtccttcccacgcgcgcccccgaagaccctcggatctccatccctgacgatgggtgtccgattgtgtcaaagcagtctctttacaccgaggatgactatgacgagaggtccgactcctcagactctagaatactcaacacatcatcttaaagtggtaccgggtggctggtgaccaggtgacattttctgtgcatttgaactctgaccccctgccctccccaggagaggcctcgtcctgtgtataccctttccttctgtttgacaaagtgactgtgcttgattctataccttagcaataaaaacataacttatttaatttcttgcacttcactggaaaatgccaaatagctctgctctgcggctttagtgctgaatgtttattgtaaaagagagtctaatgctaagaatagtcttgggaaagctgggtccacggaagatttatttggggatggaaagctgaaggtcagccttgctcctaaactcaacctggaatgttcaataaaatagtatacttgaatgcagttttgtaaaaaaggattcctcaggatatttgaaacctaaaggaagtggtttggttgcaaatggaccagaaacagggacattatattcttaggctaaaaaccttgcatttaaaagagagactgcacttaagaatagagtgaactgctcacatgcttatttaagcttggacagttttcagagacaaattccattaagaattattcttttcacatgaccgaatcgaaacatgtgtaatgtcaatgtaaaaccaatcacagctgtgaactgcatgaaatgtattgtgaaatgaacacaagattaagctttgtcaggttaatgtagcatgctaaggactctagaaaaaaataaactaaggagatga

SEQ ID NO: 14 - DNA, 2100 bp, Equus caballus
atggcggcgccggcggctcgggccgacggctccgacgcggcgctggcggcggccctggcggacgtgcccgacctgggccgccttctggaggtcgacccgtacctgaagccctacgccccggacttccagcgcaggtataaccggtttagccagactttggacaacattggaaagaatgaaggtggtattgacaagttttccagaggttatgaatcatttggcgtccacagatgtgctgacgggggcttatactgcaaagagtgggccccgggagcagaaggagtttttcttactggagacttcaatgattggaatccattttcgtacccatacaaaaaactggattatggaaaatgggatctgtatatcccaccaaagcctaataaatccctcctggtaccgcatggatccaaattaaaggtagttattaggagtaaaagtggagagatcttgtatcgtatttcaccgtgggcgaagtatgtggttcgtgaaagtggtaatgtgaattatgattggatacactgggatccagaacagccatataaatttaagcattccagaccaaagaagccaagaagtctaagaatttatgaatctcatgtgggaatttcttcccatgaaggaaaaatagcttcttataaacattttacatgcaacgtactaccaagaatcaaaggccttggatacaactgcattcagatgatggcaatcatggagcacgcttactacgccagttttggttaccagatcacaagcttctttgcagcgtcaagccgttacggaacacctgaagagctaaaagaattggttgacaccgctcactcaatgggtattacagtcctcttagatgtagtgcacagccatgcctccaaaaattcagaagatggattgaatatgtttgatgggacagactcctgttattttcattctggacctagagggactcatgatctttgggatagtcgattgtttatctactccagctgggaagttttaagattccttctgtcaaacataagatggtggttggaagaatatggctttgatgggtttcgttttgatggtgttacatccatgctctatcatcaccatggaattggtgcaagcttttcaggtgattaccatgaatattttggactccaagtagatgaagacgccttgacttatctcatgctggccaatcatttggttcacacgttgtatccggattctatcacaatagctgaggatgtctcaggaatgccggctctgtgttctccgatttcccagggagggggtggctttgactatagattagccatggcaattccggacaaatggatccagctagttaaggagtttaaagatgaagattggaacatgggcaacatagtgtacactctcacaaacagacgccaccttgaaaagtgcatcgcttatgcagagagccatgatcaggcactcgttggggataagtcactggcattttggttgatggacgccgaaatgtataccaacatgagtgttctgaccccttttactccagttattgatcgtggaatacagcttcacaaaatgattcgactcattactcacgcactcggtggagagggctatctcaatttcatgggtaatgaatttgggcatccggaatggctagacttcccaagaaaggggaataatgagagctaccattatgccagaaggcagtttcatttaactgatgatgaccttcttcgctacaagttcctaaataactttgacagggatatgaataaattggaagaaagatgtggttggctttccgctccccaggcatttgtgagtgaaaagcatgaaggcaataaggtcatcgcttttgagagagcagctcttctttttattttcaacttccatccaagcaagagctacaccaattacagagtcggaacgacattgccagggaaattcaaaattgtgctagattccgacgcagcggaatatggaggacaccagagattggaccacaataccgatttcttttctgagccttatgagcataatgagcgtccctcttctcttttggtgtacattccaagccgagtggccctcattcttcagaacgtggatccgcccaactga

SEQ ID NO: 15 - DNA, 853 bp, Equus caballus
ttctcccggtggatgctgcgtttctcagagcggaacatgaaggtgctcttcgccgccgccctcatcgtgggctctgtcttcttcctgctgttgccaggaccctccacggccgatgagaagaagaaggggcctaaagtcactgtcaaggtgtactttgacctgcgaattggagatgaagatataggccgggtggtcatcggtctctttggaaagactgttccaaaaacagtggataattttgtggccttagctacaggagagaaaggatttggctacaaagacagcaaattccatcgtgtgatcaaggacttcatgatccagggtggagacttcacccggggagatggcactggaggtaagagcatctacggtgaacgcttcccagacgagaacttcaagctgaaacactatgggcccggctgggtgagcatggccaacgcaggcaaagacaccaacggctcccagttctttatcacgaccgtgaagacagcctggctagatggcaagcacgtagtgttcggcaaagttctagagggcatggaggtagtgcggaaggtggagaccaccaagacagatgggcgcgacaagcccctgaaggatgtgacaattgcagactgtggcaagatcgaggtggagaagccctttgccatcgccaaggagtagggcctggggacttcctccctttgagcaaccatctgtgcagccgtgttgccccccaaggggtgaagacagcctgccacagggctctgcgctcccactggccccagtggtggcatctgacggagtggactcctcccctcacattccacagggcccagttttgtaacaaactcctaccaacactgaccaataa

SEQ ID NO: 16 - DNA, 1767 bp, Equus caballus
aagggaggggcaaaaagtaaaggctttatatttcctcctgagggacacagctccagtctcacctgccaaactgtccacgtcaccactggaaagcaacaaaggtagtgcttggcataaaatggattccctcagcagagcaaatgttgaattttgccttgatatgttcaaagagctgaacagtaacaatgcaggagataacatcttcttttccccactgagtctgctttatgcgctgagtatgatcctccttggtgccagaggaaacagtgcagagcagatggaaaaggtgcttcactttaaccatattgcaggatcgttaaaaccaaggtttacgggttcatctaagtgcagccaaactggaaatattcattcagagtttggagtcctattctctcaaatcaaccagccagactccaactacaccctcagcattgccaacagactctatgggacaaaggcaatggcgttccatcagcaatatttaagctgttctgaaaaattatatcaagccacgccgcaaactgttgattttgaacggtctacagaagaaacgaggaaaacgattaacgcttgggtggaaagtaaaactaatggaaaaatcacaaacctctttggaaagggcacaattgacccttcctgtgtaatggttctggtgaatgctatatatttcaaaggacaatggcaaaataaatttcaggaaagagagacagtgaaaactccttttcggctaagtgagggtaaaagcgtaattgtggaaatgatgtatcaaactggaacatttaaactggcctttataaaggagccacagatacaagttcttgagttgccctacgttaacaacaaactaagcatgattattctgcttccagtaggcacggctaatctagaacagatagaaaagcagctgaatgtgaagacattttatgagtggaccagctcttctaacatgatggaaagggaagttgaagtccacatcccccgattcaaactggaaatcaagtacgagctaaattccctcttaaaatccctcgggatgacagatatcttcaaccagatcaaagccgatctttccggaatatcaccagccaagggcctatatttatcaaaggtcatccacaagtcgtatgtggatgtcaacgaagagggcactgaggcagcagcagccactggcgacagcttcatcgtaaaaagactccccatccgagctaagttcgtggcaaatcaccccttcctgttcttcataaggcacattcaaaccaacacgattctcttctgtggcaagcttgcctctccctaaaccaatggggttaggcaaagctcagaatcacagaggaggtgcagggacaaccctgtgaccaaagcagttcatacctcacacacctctgtgcctcagtttgtttgtctgcaaaatgggtctaggatctctctgaacttgttcaatgagttggtaatcatggaagaaggtatatatttacaaaaaagcttttctggctctcttatctttggggcctcatctgcgtgctgtctgggtaacatgatcaagtcaatgagaagaatgttaaaggattggattttcttgacttgtatttatcagtgagcttgtgaataagtgactactgtactttcagaaaaccaatttaagggctgcaactttgattgactttttaaatataattttcttcgcatgtgtaaatataatattgtgactttagttcaaaattctgtgttgactataataaataaacgaaatgctttatgttctttgaa

SEQ ID NO: 17 - DNA, 2665 bp, Equus caballus
ccggcccgcttagctgctgcagcccgcggtctgaggaacctgaggcgcggggccgggagccgcgaggatcctggacggcggcgggcgcgagggcgggcgcgtccagagtggtcgcgcgggtcagctgccgcccctccgccttgtttcttgcgggtccccttcttctccgccgggacgcgggagagcccggcgcgcggcgggggcgcgaggtggagccggcgggggcggccaatgcgaaactggctggtgctgctgtgcccgtgtgtgctcggggccgcgctgcacctctggctgcggctgcgctccccgccgcccgcccgcgcctccggggccggcccggcagatcaatttgccttattccctcagtggaaatctggtcactatgatgtggtggttggtgtgttgtcagctcgcaataaccatgagcttcgaaatgcgataagaagcacgtggctgaagcatctaatacagcatccagcattaagtaaacgtgtgcttgtgaagttcatcataggtgctcatggctgtgaagtgcctgtggaagacagggaagatccttactcctgcagactactcaacatcacgaatccagttttgaatcaagaaattgaggcattcagtctttctgaagacacttcatcagggctctctgaggaccgagttgtcagtgtgagcttcagagttctctaccccatcgttattaccagtcttggggtgttttatgatgccaacggtgtgggtttccaaaggaacatcaccgtcaagctttatcaggcagaacaggaggaggccctcttcattgctcgctttagtcctccgagctgtggtgtgcaggtgaacaggctgtggtacaagcctgtggagcacttcatcttaccagagagctttgaaggtacaatcgtgtgggagagccaagacctccaaggccttgtgtcaagaaatctccacaaagtgacagtaaatgatggagggggagttctcagagtcattacagcgggggagggtgcactgcctcctggattcgtggaaggcgtggagggagttgcagggggttttatttacaccattcaggaaggtgatgctctcttacaaaacctgcattctcgccctcaaagacttattgatcatataagtaatctccatgaggaggatgccttactgaaggaggaaagcagtatctatgatgatattgtttttgtggatgttgtggacacttatcgaaatgttcctgcaaagttactgaacttctatagatggactgtggaaacaaccagctttgatttattgctaaagacggatgatgactgttacatagacgtcgaagctgtgtttaatagaattgcccacaagaatctggatgggcctaatttttggtggggaaatttcagactgaattgggcagttgaccgaactggaaagtggcaggagctggagtaccccagtcctgcttacccagcctttgcgtgtgggtcagggtatgtgatctccaaggacatcgtccactggctggccagcaactcggggaggttaaagacctatcagggtgaagacgtaagcatgggcatttggatggcagccataggacctagaagataccaggacagcctgtggctgtgtgagaagacttgtgaaacaggaatgttgtcttccccgcagtattctccacaggaactgacagaactgtggaaactgaaggagttgtgtggtgatccttgtcagtgtgaagcaagatgaggattttatttcgcagtgtttaaagatcagggacaagagaagctgtgacacaggaactttgagaagacgcgacagcaatcctttcaccttctggattgtcatggagtctgtcaaagaaaagaaaaaccatcaaccctctcacatgagttgcctgtaaatctagctcatgtgacgagaccacaactgcagtgacagctgtgactgtcatttcacagtgtcagtttaccccagtcagtggctggggaagctcaccgcggtctcacaccggttacttgagtcacttggggagctgtgggagacggagccaatgtttgacctaagtgcccttgacaatgagttttcattccattccagtcatttttagtatttcctccttaattggaatgaacagaaagcattctctgtagaggaatatgtgtaagtgtgatcattaactcgttaaccctttgtgatgacctgcttatgcatcactcagagaacgctggggcggggcccaggcaccctgagcacgtctgcaccctctctggcctgcctttcctcctctgcaaagcgagggtagactcgacgtccgcaagctcccttccagcgctgccggtctgtaatcgttatcctgtgtcactgtgcccgacagatatgtgcaggtggccgccaggcgtgggaatgtaacttagtgagtaaatgctttggtttgttcagaaaacactatgaacttctttccaaagatgggttgtggtaaataatggatattttgattatgagaaatatagtttctttgaagctttagctggaggtacagcaatagtgtggtgttcctacaaatatgacatgtattcaaacaaatatttttctatcaaaaatcatttttgtaaaagctgtctgtgtttttatgcaacttgtgataataaatgttatctttattttagaataaaaa

SEQ ID NO: 18 - DNA, 5505 bp, Equus caballus
atggccagctcatctctgcccaacctggtgcctctgggccctgagagcctgcgccccttcacccgggcgtccctggcagccatagaacggcgggcgttggaggaggaagcccggctgcagcggaacaagcagatggagatccaggagactgagcggaacgcgcgcagtgatctggaggctggcaagaacctgcctctcatctatggggaccctccaccagaggtcatcggcatccctctggaggatctggacccctactacagcaacaagaagaccttcatcgtgctcaacaagggcaaggccatcttccgcttctccgctacacctgctctctacatgctgagtcccttcagcatcatcagacgcagcgccatcaaggtgctcatccactcgctgttcagcatgttcatcatgatcaccatcttgcccaactgcgtggtcatgaccatgagtgacccgcctccctggcccatacatgtggagaacaccttcacaggaatcaacacctttgaatccctcatcaagatgctggcccgaggcttctgcatcgacgatttcacattcctccgggatccctggaactggctggacttcagtgtcatcatgatggcgtacctgacagagtttgtggacttgggcaacatctcagccctgagaaccttccgggtgctgcgggccctgaaaaccatcacggtcatcccagggctgaagacgattgtgggggccctgatccagtcggtgaagaagctgtcagatgtgatgatcctcaccgtcttctgcctgagtgtctttgccctggtggggctgcagctctttatgggaaacctgcggcagaagtgtgtgcgctggccccagcccttcaacgacaccaataccacctggtacggcaatgacacctggtacagcaatgacacgtggaacagcaatgacacgtggagcagcaatgacatgtggaacagccatgagagcatggccagcaactatacctttgactgggatgcctacatcaatgatgaagggaacttctacttcctggagggtgccaaggatgccctgctctgtgggaacagcagtgatgctgggcactgccccgagggttacaagtgcatcaagactgggcggaaccccaactacggctacaccagtcacgacaccttcagctgggccttcctggctctcttccgcctcatgatacaggactattgggagaacctcttccagctgacccttcgagcagccggcaagacctacatgatcttctttgtggtgatcattttcctgggctccttctacctcatcaatctgatcctagcagtggtaaccatggcgtacgcggagcagaatgaggccaccctggctgaggatcaggagaaagaagaggagtttcagcagatgatggagaaattccaaaagcagcaggaggagctggagaaggccaaggctgatcaggctttggaaggtggggaggcaggcggggacccagcccacagcaaagactgtaacggcagcctggacacatcaccaggggagaaggggcccccaaggcagagctgcagcgcagacagcggcgtctcagatgctatggaagagctggaagaggcccaccagaagtgcccgccatggtggtacaagtgtgcccacaaagtgctcatatggaactgctgcaccccatgggtgaagttcaagaacatcatccacttgatcgtcatggatccctttgtggacctgggcatcaccatctgcatcgtactcaacaccctcttcatggccatggaacattaccccatgacggagcactttgacaaagtgctcaccgtgggcaacctggtcttcacgggcatcttcacagccgagatggtactgaagctcatcgccttggacccctacgagtacttccagcagggttggaacgtctttgacagtatcatcgtcaccctcagttgggtggaactgggcctggttaatgtgaaggggctgtctgtgctccgctccttccgtctggtgcggtcgttgaaactggccaagtcgtggccaacactgaacatgttcatcagaatcatcgggaactcggggggggggctgggcaacctgaccctggtgttggccatcatcgtggtcaacttttccgtcgtgggcatgcagctgttcggcaagaactacaaggagtgtgtgtgcaagaatgcctcggactgcgcccttccccgctggaaaatgtgcgacttcttccactctttcctcatcgtcctccgcattctgtgtggggagtggatcgaacccatgtggggcttcatggaggtggctggccaggccatgttcctaaccgtcctcctcatggtcatggtcaacggcaacctggtggacctggacctcttcctggcccttcttctgaaccccctcaactctgacaacctctcggcctcggacgaggatggcgagatgaacaacctccagatctccagctggcccatcaagttgggcatctgctttgccaacgccttcctcctggggctgctgcatggcaagatcctgagccccaaggatatcatgctcagcctgggggacccgggcgaggctggggaggcaggggaggctgaggagagtgcccccgaggatgagaagaaggagccaccgcctgaggatgatgacaaagacctgaagaaggacaatcacatcctgaaccacatgggcctggttgatggcactccaaccagcatcgagctggaccacctcaacttcatcaacaacccctacctgaccatccacgtccctattgcctccgaggagtctgacctggagatgcctacagaggaggagactgacactttctcagagcctgaggatggcaagaagccactacagcccctcgacgggaactcctccgtctgcagtacggccgactacaagccccccgaggaggaccccgaggaacaggccgaggagaaccctgagggggagcagcctgaggagtgcttcaccgaggcctgtgtgcaacgctttccctgcctctccgtggacatctcccagggccgtgggaagatgtggtggaccctccgcagggcctgcttcaagattgtcgagcaccactggtttaagaccttcaattcctcattgatcctgctcaacagtggaaccttggccttcgaggacatctacatcgagcagcggcgagtcatccgcaccatcctggagtacgctgacaaggtcttcacctacatcttcatcatggagatgctgctcaagtgggtggcttacggcttcaaggtatacttcaccaacgcctggtgctggctcgacttcctcatcgtggacgtctccatcatcagcctagtggccaactggctgggctactccgagctgggacccatcaaatccctgcggacactgcgtgccctgcgtcccctgagggcactgtcccgcttcgagggcatgagggtggtggtgaacgccctcctaggcgccatcccctccatcatgaatgtgctgcttgtctgcctcatcttctgggtgatcttcagcataatgggcgtcaacctgtttgcggccaagatctactacttcatcaacaccaccacctccgagagattcgacatctccggggtcaacaacaagtccgagtgcgagagcctgattcacacaggccaggtccgctggctcaatgtcaaggtcaactacgacaacgtgggtctgggctacctctccctcctccaggtggccaccttcaagggctggatggacatcatgtattcagccgtagactctcgggagcaggaggagcagccgcagtatgaggtgaacatctatatgtacctctatttcgtcatcttcatcattttcgggtccttctttacaatcaactccctcatccgcctgatcattgtcaacttcaaccagcagaagaagaagcttggagggaaagacatcttcatgacggaggaacagaagaaatactataatgccatgaagaagcttggctccaagaagcctcagaagccaattccccggccccagaacaagatccagggtatggtgtatgactttgtgacgaagcaggtgttcgacatcacgatcatgatcctcatttgcctcaatatggtcaccatgatggtggagacggacgaccagagccagctcaaggtggacatcctgtacaacatcaatatggtcttcatcatcgtcttcacgggggagtgtgtgctcaagatgttcgccctgcgccaaaactacttcaccgttggctggaacatcttcgacttcgtggttgtcatcctgtccattgtgggcctcgcactctccgacctgatccagaaatacttcgtgtcacccacactgttccgtgtgatccgcctggcacggatcgggcgcgtcctgcggctgatccgtggggccaagggcatccggacgctgctctttgccctcatgatgtcactccctgccctcttcaacattggcctgctcctcattctggtcatgtttatctactccatcttcggcatgtccaactttgcctatgtgaagaaggagtcaggcatcgatgacatgttcaactttgagacctttggcaacagcatcatctgcctcttcgagatcaccacgtcagctggctgggacgggctcctcaatcccatcctcaacagcgggccccctgactgtgaccccacactggagaacccgggcaccagtgtcaggggtgactgcggcaacccctccatcggcatctgcttcttctgcagctacatcatcatctccttcctcatcgtggtcaacatgtacattgccatcatcctggagaatttcaacgtggctaccgaggagagcagcgaccccctgggtgaggacgactttgagattttctttgagaaatgggagaagtttggccctgacgccacgcagttcattgattatagccgcctctctgacttcgtagacaccttgcaggaaccactgaggatcgccaagcctaacaagataaagctcatcacgctggacctgcccatggtgcccggcgacaagatccactgcctggacatcctctttgccctgaccaaagaggtcctgggtgactctggggaaatggatgccctcaaggagaccatggaggagaaattcatggcagccaacccatccaaggtctcctatgagcccatcaccaccaccctcaagaggaagcaggaggaggtgtgcgccatcaagatccagagggcctaccgccggcatctgcttcagcgctctgtgaagcaggcatcctacatgtaccgccacagtcaggacggcagcggggatggggcccccgagaaggagggactgatcgccaacaccatgagcaagatgtatggccgtgagaatgggaacagtggtgttcagaacaagggtgaggagaggggctcaacaggggatgctggacctaccatggggctcacacccatcaacccctcggactctgccctccctccctccccaccaccgggtctgcctttacacccaggggtcaaagagtctcttgtctag

SEQ ID NO: 19 - DNA, 5981 bp, Equus caballus
cacttcaaggccgcatctctaaggcagggtctttgactgggcctccatcaataacccgcagccatgagttcagaccaggaaatggctatatttggggaggctgctccttacctccgaaagtctgaaaaggagcgaattgaagcccagaataagcctttcgatgccaagacatcagtttttgtggctgaccctaaggagtcctttgtgaaagcaacagtgcagagcagggaaggagggaaggtgacagccaagactgaagctggagctacagtaactgtgaaagaagaccaatgcttccccatgaaccctcccaaatatgacaagatcgaggacatggccatgatgactcacctgcatgagcctgctgtgctgtacaacctcaaagagcgctacgcagcctggatgatctacacctactcaggtcttttctgtgtcaccgtcaacccctacaagtggttgccagtgtacaacgccgaggtggtgacggcctaccgaggcaaaaagcgccaggaggccccgccccacatcttctccatctctgacaacgcctatcagttcatgctgactgatcgggagaatcagtctatcttaatcactggagaatctggtgccgggaagactgtgaataccaagcgtgtcatccagtactttgcaacaattgcagttactggggagaagaagaaggaggaacctacttccggcaaaatgcaggggactctggaagatcagatcatcagtgccaaccccctactggaggcctttggcaacgccaagaccgtgaggaatgacaactcctctcgctttggtaaattcatcaggatccacttcggtaccacagggaaactggcttctgctgatattgaaacatatcttctggagaagtctagagttactttccagctaaaggcggaaagaagctaccacattttttatcagatcatgtctaacaagaagccagatctaattgaaatgctcctgatcaccaccaacccgtatgactatgcctttgtcagtcaaggggagatcacagtccccagcattgatgaccaagaagagttgatggccacagatagtgccattgagatcttgggcttcacttctgatgaaagagtgtccatctataagctcacaggggcagtaatgcattacgggaacctgaaattcaagcagaagcagcgtgaggagcaagctgagccagatggcactgaagttgctgacaaggctgcctatcttcagggtctgaactctgctgacctgctcaaagctctctgctaccccagggtcaaggtcggcaatgagttcgtcaccaaaggccagactgtagaacaggtgtacaatgcggtgggtgctctggccaaagccgtctacgataagatgttcctctggatggtcgcccgcatcaaccagcagctggacaccaagcagcccaggcagtacttcatcggggtcttggacatcgctggctttgagatctttgatttcaacagcctggagcagctgtgcatcaacttcaccaacgagaaactgcaacagtttttcaaccaccacatgttcgtgctggagcaggaggagtacaagaaggaaggcatcgagtgggagttcatcgacttcggcatggacctggctgcctgcattgagctcatcgagaagccgatgggcatcttctccatcctggaagaggagtgcatgttccccaaggccacagacacctccttcaagaacaagctgtatgaacagcatcttggaaagtccaacaatttccagaagcctaaacctgtcaaaggcaagcctgaggcccacttctccctgattcactacgccggcactgtggactacaacattactggctggcttgacaagaacaaggaccccctgaatgagaccgtggtcgggctgtaccagaagtcttcagtgaagactctggctttgctcttctctgggccagcaagtgctgatgcggaggctggtggaaagaaaggaggcaagaagaagggttcttctttccagaccgtgtctgcgctcttcagggagaatttgaataagctgatgaccaacctgaggagcactcaccctcactttgtacggtgcatcatccccaatgaaaccaaaactcctggtgccatggagcatgaacttgtcctgcaccagctgaggtgcaatggtgtgctggaaggcatccgcatctgcagaaagggattcccaagcaggatcctttatgcagacttcaaacagagatacaaggtattaaatgcaagtgctatccctgaaggacaattcatcgatagcaagaaggcgtctgagaagctccttgggtccattgacattgaccacacccagtacaaatttggtcacaccaaggtcttcttcaaagctggtctcctggggctcctagaggagatgcgagatgacaagctggcccagataattacccgaacccaggccaggtgcagagggttcttggcaagagtggagtaccagaggatggtggagagaagagagtccatcttctgcatccagtacaatgtccgtgccttcatgaacgtgaagcactggccctggatgaagctgtatttcaagatcaagcccctcctcaagagtgcagagacagagaaagagatggccaacatgaaggaagaattcgagaagaccaaagaaagccttgcaaaggctgaggccaaaagaaaagagctggaagaaaaaatggtagctctgatgcaagagaaaaacgacctgcaacttcaggttcaagctgaagcagacagtttggctgatgcagaggaaagatgtgaccagctgattaaaaccaaaatccagctggaggccaaaatcaaggaggcgactgagagagctgaggatgaggaagagatcaacgctgagctgacggccaagaagaggaaactggaggacgaatgctcagagctcaagaaggacattgatgaccttgagctgacactggccaaggttgaaaaggagaaacatgccacagaaaataaggtgaaaaacctcacagaggagatggcaggcctggacgaaaccatcgctaagctgaccaaggagaagaaggccctccaagaggcccaccagcagaccctggatgacctgcaggcagaagaggacaaggtcaacactctgaccaaagctaaaaccaagctagagcagcaagtggatgatcttgaaggatctctagagcaagaaaagaaacttcgaatggatctagaaagagcaaagaggaaactggagggtgacctaaaattggcccaagaatccacaatggacatagaaaatgacaaacagcaacttgatgaaaaactgaaaaagaaagagtttgaaatgagcaatctgcaaagcaagattgaagatgagcaggcccttgcgatgcagctgcagaagaagatcaaggagttacaggcccgcatcgaggagctggaggaggaaatcgaggcagagcgcgcctcccgggccaaagcagagaagcagcgctccgacctctcccgggaactggaggagatcagcgagaggctcgaagaagccggtggggcgacttcagcccagattgagatgaacaagaagcgggaggctgagttccagaaaatgcgcagggacctggaggaggccaccctgcagcatgaagccacggcggccgctctgcggaagaagcacgcggacagtgtggcagagctcggggagcagatagacaacctgcagagagtcaagcagaaactggagaaggagaagagcgaaatgaagatggagattgacgacctggcgagcaacatggagactgtctccaaagccaagggcaaccttgaaaagatgtgccgcaccctggaagatcaactgagtgaacttaagagcaaagaggaagagcagcagaggctggtcaatgacctgacgggccagagagcgcgcctgcagacagaagcaggtgaatattcacgccagctagatgaaaaggactcattagtttctcagctctcaaggggcaaacaagcattcacacaacagattgaggaactgaaaaggcagcttgaagaggagataaaggccaagagtgccctggcccatgccctgcagtcagcccgccatgattgtgacctgctgcgggaacagtacgaggaggagcaggaagccaaggccgagctgcagagggcaatgtccaaggccaacagtgaggttgcccagtggaggaccaagtacgagacggacgccatccagcgcacggaggagctggaggaggccaagaagaagctggctcagcggctgcaggatgctgaggaacacgtagaagctgtgaatgccaaatgtgcttcccttgagaagaccaagcagcggctccagaatgaagtggaggacctcatgattgatgttgagagaaccaatgctgcctgtgcagccctggacaaaaagcaaaggaacttcgataagatcctgtcagaatggaagcacaagtatgaagaaactcatgctgaacttgaagcttcccaaaaggagtccaggtcactcagcacagagctgttcaaggttaagaatgcttatgaggaatccttagaccaacttgaaaccttgaagcgggaaaataagaatttgcaacaggagatttctgatctcactgagcagattgcagaaggagggaagcgtatccatgaactggaaaaagtaaagaagcaaattgagcaagaaaagtctgaaattcaggctgctttagaagaagcagaggcatctcttgaacacgaagagggaaagatcctgcgcatccaactggagttgaaccaagtcaagtctgaaattgataggaaaattgctgaaaaggatgaggaaattgaccagctgaagagaaaccatgtcagagttgtggagacgatgcagaccatgctggatgctgagatcaggagccggaatgatgccatcaggatcaagaagaagatggagggagacctcaatgaaatggaaatccagctgaaccacgccaaccgcatggctgcagaggccctgaggaactacaggaacactcaaggcatcctcaaggacacccagctgcacctggatgatgctctccggggccaggaggacctgaaggagcagctggccatggtggagcgcagagccaacctgctgcaggccgagatcgaggagctgcgggccactctggagcagaccgagaggagcaggaaaatcgcagaacaggagctcctggatgccagtgagcgcgtccagctcctgcacacccagaacaccagcctgatcaacaccaagaagaagctggagacagacatttcccagctgcagggagagatggaagatatcgtccaggaagctcacaatgcagaagagaaggccaagaaggccatcactgatgcggccatgatggctgaggagctgaagaaggagcaggacaccagcgcccacctggagcggatgaagaagaatctggagcagacggtgaaggacctgcagcaccgtctggatgaggccgagcagctggccctgaagggtgggaagaagcagatccagaaactggaggccagggtacgtgaccttgaaggagaagttgaaagtgaacagaagcgcaatgttgaggctgtcaagggtctgcgcaaacatgagagaagagtaaaggaactcacttaccagactgaggaagaccgcaagaatatactcaggctccaggatctggtggataaactgcaatcaaaggtgaaagcttacaagagacaagctgaggaagcggaggaacagtccaatgtcaatctctccaaattccgcaagatccagcacgagctggaggaggccgaggaacgggctgacatcgccgagtcccaggtcaacaagctgcgggtgaagagccgggaggttcacacaaaaatcattagtgaagagtaattcatccaaatgctaaaagtgaccaaagaaatgcacaaaatgtgaagttctttgtcactctattttgtacttaagatttttgcagataaaaaatttatcag

SEQ ID NO: 20 - DNA, 1236 bp, Equus caballus
ccgcgggccgcgcggagatggggggcagcgcccccggccagtctccgtaccagcggctgagtcagaggatgctggacatctccggggaccggggcgtgctgaaggacgtcatccgagagggggccggcgagctggtgacgccggatgcctcagtgctagtgaaatattctggctatctggagcacatggacaagccttttgattccaattgcttcaggaagactcctcggctcatgaagcttggagaggatattaccctttggggcatggagctgggccttctgagcatgcggagaggggagctggccaggtttctgttcaaaccaacctatgcttatggaacgctgggctgcccaccgttgatacccccaaacaccaccgttctgttcgagatcgagctgcttgacttcctggactctgctgagtcagacaagttctgtgccctctcggccgagcaacaagatcaatttccgcttcagaaggtcctgaaagtggcagctactgaacgggagtttggcaactaccttttccgccaacatcgtttctatgacgccaaagtgaggtataaacgggccttgttgcttctccatcggcggtcggcaccccctgaggagcagcacctggtggaggccgccaagcttcttgttctcctcaacctgtcctttacgtacctgaagctggagcgacccaccacggccctgtgctatggggagcaggctctggtcattgaccagaagaatgccaaggccctctttcgctgtggacaggcctgtctcctgatgactgagtatcagaaggcccgggattttctagtccaagcccagaaggcacagcccttcaatcatgacatcaataatgagctgaagaaactggccagctgttacaaggactacacggataaagagaaagaaatgtgccaccgaatgtttgccccttgtgatgatgactctgcagtaggagaaaactgaagattcttccgctaactacaagcaagagaagcaaggctgctggagctccctgttgtcacgagtctgggagtactttgtagaaagaacgaacctccaaggcaggcagctgctgtgacctgctcggggcgcgggctggagctccacagccctggcattgctgcctctgaccgacccactgagatgttttcataggtgctgttttctgtttcacattttcatacacagggtaggggaaagtgtagctactgacaagtagaaaaatgctaat

SEQ ID NO: 21 - DNA, 401 bp, Equus caballus
  misc_feature (201)..(201): n is g or a
  misc_feature (265)..(265): n is a, c, g, or t
aacaggggcagtaacgacaccgacctgctgtcatggagatgacctctgcagaggcacctggcgcacacacggcagtagacagaagcccacaatctgcaggaggactagagctgtggtcacgcttgcatcgtggtgttgtggctttgtttcctcactggtgtccttgtctttggtcctcaggagcaacaagatcaatttccncttcagaaggtcctgaaagtggcagctactgaacgggagtttggcaactaccttttccgccaanatcgtttctatgacgccaaagtgaggtataaacgggtaagactttcaaaggataggtttagaccctgaaacttccttgtttgaaagatagactttgtctctttccctggtcttccctggtcatatgcagccattga

SEQ ID NO: 22 - DNA, 401 bp, Equus caballus
  misc_feature (137)..(137): n is a, c, g, or t
  misc_feature (201)..(201): n is c or a
acacacggcagtagacagaagcccacaatctgcaggaggactagagctgtggtcacgcttgcatcgtggtgttgtggctttgtttcctcactggtgtccttgtctttggtcctcaggagcaacaagatcaatttccncttcagaaggtcctgaaagtggcagctactgaacgggagtttggcaactaccttttccgccaanatcgtttctatgacgccaaagtgaggtataaacgggtaagactttcaaaggataggtttagaccctgaaacttccttgtttgaaagatagactttgtctctttccctggtcttccctggtcatatgcagccattgagaaaaatctcattaaaaaatccttgtgccagagagctaatgactaagagaggggacccaggatt

SEQ ID NO: 23 - DNA, 3991 bp, Equus caballus
tgggtcctccttattcacaggtgagtcacaccctgaaacacaggctctcttcctgtcagggactgagtcaggtagaagagtcgataaaaccacctgatcaaggaaaaggaaggcacagcggagcgcagagtgaagaactcccagcggcgaggcgcgcggcagcgacccctgcagcggcggaccgcgcgccggcctggccatgcctgcgctctggctgcgctgcggcctgtgcctggcgctgctgctgcctgcggcccgggcctcctccgggagccaagtgtgtgattgcaatgggaagtccaggcaatgcatctttgaccaggaacttcacaaacagacaggaaatggattccgctgcctcaactgcaatgacaacactgatggcatccactgcgagaggtgcaaggcaggattttaccgacagagagaaagggaccgctgtttaccctgcaattgtaactctaaaggttctcttagcgctcgatgtgacaactctggacggtgcagctgtaagccaggtgtgacaggagacaggtgtgaccgatgtctgcccggcttccacacactcactgatgctgggtgcgcccaagaccaaaggctgctagactccaagtgtgactgtgacccagctggcatctcagggccctgtgactcaggccgctgtgtctgcaagccggctgtcactggagagcgctgtgataggtgtcgaccaggttactatcacctggatgggggaaaccctcagggctgtacccagtgtttttgctatgggcattccgccagctgccacagctctggggactacagtgtccataaaatcatctctgccttccatcaagatgttgatggctggaaggctgtccaaagaaacgggtctcctgcaaagctccagtggtcacagcgccatcgggatatatttagctcagcacgacgatcagaccctgtctattttgtagctcctgccaaatttcttgggaatcaacaggtgagctacgggcaaagcctatcttttgactaccgtgtggataggggaggcagacacccatctgcccatgacgtgatcctggaaggtgctggtctacggatcacagctcccttgatgccacttagcaagacactgccttgtgggatcaccaagacttacacattcagattaaatgaacatccaagcagtaattggagcccccagctaagttactttgagtatcggaggttactgcggaacctcacagccctgcggatccgagctacctacggagaatacagtactgggtacattgacaacgtgaccttgatttcagcccgccccgtttctggagccccagcgccctgggttgaacaatgtgtatgccctgttggctacaaggggcagttctgccaggattgtgcttccggctacaaaagagattcagccagactgggaccttttggcacctgtattccatgtaactgccaagggggaggggcctgcgatccagacacaggagactgttactcaggggatgagaaccctgacatccctgagtgtgctgactgccccattggtttctacaacgatccacaagacccccgcagctgcaagccgtgcccctgtcgcaatgggttcagctgctccgtgatgcctgagacagaggaggtggtgtgcaataactgcccccagggtgtcactggtgcccgctgtgagctctgtgctgatggctattttggggaccccttcggggaacgtggcccagtgaggccttgtcagccctgtcagtgcaacaacaacgtggaccctagtgcctccgggaactgtgaccgcctgacaggcaggtgtctgaagtgcatccacaacacagctggggtccactgtgaccagtgcaaagcaggctactatggggacccgttggctcccaatccagcagacaagtgtcgagcttgcaactgcaacccagtgggctcggagcctgtggagtgtcgaagtgatggcagctgtgtttgcaagccaggctttggtggcctcagctgtgagcatgcggcactgaccagctgtccagcttgctataatcaagtgaaggttcagatggatcagtttatgcagcagctccagatcctggaggccctgatttcgaaggctcagggtggagcagtacccaacgcagagctggaaggcaggatgcagcaggctgagcaggcccttcgggacattctgagagaagcccagatttcacaagatgctgttagatccttcaatctccgggtggccaaggcaaggactcaagagaatagctaccgggaccgcctggatgacctcaagatgactgtggaaagagttcgggccctgggcagtcagtatcagaaccaagttcaggatactcgcaggctcatcactcagatgcgcctgagcctggaggaaagtgaggcttccctgcaaaacaccaacattcctccttcagagcactacgtggggccaaatggctttaaaagtctggctcaggaggccacgagattggcagacagccatgttcagtcagccagtaacatggagcaactggcaaaggaaacccaggagtattccaaagagctgatgtcactggtgcgcgaggctctgcaggagggaggcggaagcggcagcctggacggagccgtggtgcaaaggcttgtgggaaaattgcagaaaactaaatctctggcccaggagttgtcgagggaggccacgcaaaccgacatggaagcagataggtcttatcagcatagtctccaccttctcaattccgtgtcccagattcagggagtcaatgatcagtccttgcaggtagaagcgaagaggctcagacaaaaagctgattctctctcaaaccgtgtgactaagcatatggatgagttcaagcacgtgcaaagcaatctgggaaactgggaagaagaaacccggcagctcttacagaatggaaagaatgggagacagacatcagatcagctgctttcccgtgccaaccttgctaaaagcagagcccaagaagcactaagtatgggcaatgccactttttatgaagttgagaacatcttaaagaatctcagagagtttgacctgcaggttggagataaaagagcagaagctgaagaggccatgaagagactctcctacatcagccagaaggttgcaggtgccagtgacaagacgaagcaagcagaagcagccctgggcagtgctgctgccgacgcccagagggcaaagaatgcagccagggaggccctggagatctctggcaagatagaacaggagataggaggtctgaacttggaagccaatgtgacagcagatggagccttggccatggagaagggactggccactctgaaaagtgagatgagagaagtggaaggagagctgtcaaggaaggagcaggagtttgacatggatatggacgcagtgcagatggtaattgcagaggcccaaagagttgaaaacagagccaagaatgctggagttacgatccaagacacactcaacacattggatggcatcctacacctaatagaccagcctggcagtgtggatgaagagaggctgatcttactggagcagaagcttttccgagccaagactcagatcaacagccagctacggcccttgatgtcagagctggaagagagggcacatcggcagaagggccacctccgtttcctggagactagcatagatgggattctggctgatgtgaagaacctggagaacatcagggacaacctgcccccgggctgctacaatacccaggctcttgagcaacagtgaagctgccttagagatttctcaaccaaggttcttgggattcagacctagctgccttagagatttctcaaccaaggttcttgggattcagacctcagggctcaggagcccgcatgcgggtggggtgggatgggaatatttgaatatgttgaatgcgtgtgctcaggccccagtgaacctgatcccatccctgagacctcggccagataaatgtctttattg

SEQ ID NO: 24 - DNA, 7573 bp, Equus caballus
ccccgcccggcccagccctgctccctgccggcggcagcccgggcgcttcctagtcggcggggcggccgcccgggcgaggtgcggcctccgcgcgggcggggggcgtcggcgccgtgggccgccatggccgcgtccgagctctacacaaagtttgccagggtttggatacctgatcctgaggaagtttggaagtcggcagagctactgaaagattataagccgggagacaaagtccttctgcttcacctcgaggaaggaaaggatttggaatatcgtctagatccaaagaccaaggaactgcctcacttaagaaaccctgacatacttgtgggtgaaaatgacctcacggccctcagctatcttcatgagcctgctgtgctccacaatctcagagtccgctttattgattcaaaacttatttatacatattgtggtatagtcctagtagctataaatccttatgaacagctgcctatttatggagaagatattattaatgcatacagtggtcagaacatgggtgatatggatccacatatctttgcagtggctgaagaagcttacaagcaaatggccagagatgaacgaaatcagtccatcattgtaagtggagaatctggggcaggaaaaacagtctcagctaagtatgccatgcggtactttgcaactgtaagtggttctgccagtgaagccaatgttgaggaaaaggtcttggcctccaacccaatcatggagtcaattggaaatgctaagacaaccaggaatgataatagcagccgttttgggaagtatattgagattggttttgataagagatatcgaatcattggtgccaatatgagaacttaccttttagagaaatccagggtggtgttccaggcagaagaggagagaaactatcatatcttctatcagctttgtgcctcagcaaagttacctgaatttaaaatgctgcgattaggagatgcaaataactttcattacacgatgcaaggtggcagtcctgagattgaaggagtggatgatgccaaggagatggcaaataccaggcaggcctgcactttgctaggaattagtgaatcttaccagatgggaattttccgaatacttgctggaatccttcacttaggcaatgttggatttacgtctcgagattcagacagctgcacaatacctttagagatgataatgttcaccctgcctattctccaggaatgttatcagattcagttgaaacatcccaagcatgaacctctcagcatcttctgtgacctcatgggtgtggactatgaggagatgtgtcactggctctgccatcggaagctggctactgccacagagacatacatcaagcccatctccaagctgcaggccacaaatgcccgtgatgctttggccaagcacatctatgccaagctctttagctggattgtagatcatgtcaatcaagctctccattctgctgtcaaacagcactcttttattggcgtgctggacatttatggatttgaaacatttgagataaatagttttgaacagttttgcataaattatgcaaatgaaaaactgcagcaacaattcaatatgcatgtcttcaaattagaacaagaggaatatatgaaggaacaaattccatggacactcatagatttttatgataatcagccttgcattaatcttatagaatctaaactgggcattctagatttgttggatgaggaatgcaagatgcctaaaggtacagatgacacttgggcccaaaagttgtacaacacgcacttgaacaaatgtgcactctttgaaaagccccgtctatcaaacaaagctttcatcatccaacattttgctgacaaagtggaataccagtgtgaaggctttctggaaaagaataaagacactgtttttgaagaacaaattaaagttcttaaatcaagcaagtttaagatgctaccagaattgtttcaagatgatgagaaggccatcagtccaacctcagccacctcttcagggcgcacgcccctcacccgcactcctgtaaagcccaccaaaggcagaccaggccagatggccaaagagcacaagaagacagtggggcaccagttccgaaactcccttcacctgcttatggagaccctgaacgccactacccctcactacgtccgctgcattaagcctaatgacttcaagttcccattcacgtttgatgagaagagggcagtgcagcagctgagagcgtgtggtgtcctggaaaccatccgaatcagcgcagcgggattcccctcgcggtggacttaccaagagtttttcagccgctaccgtgtcctaatgaagcaaaaagatgtgctgagtgacaggaagcaaacgtgcaagaatgtattggagaaactgatcctggacaaggacaaataccagtttggaaagacaaagatctttttccgtgccggtcaagtggcctatctagaaaagctgagggcggacaagctgagagccgcctgcatccggatccagaagacgatccgagggtggctgctgcggaagaagtaccttcgcatgcggaaggcggccatcaccgtgcagagatacgtgcgcggctaccaggcccgatgctatgctaagttcctgcgcagaaccaaggcagcaaccatcattcagaagtactggcgcatgtacatagttcgcaagaggtacaagattaaacgaactgctactatcgttcttcagtcttatttgcgaggctacttagccagaaataggtatcgcaagatactccgtgagcacaaagcagtcatcattcagaagtgggtccggggctggctggctcgcacttactacaagaggagcatgcatgccattatctaccttcagtgctgtttccgacggatgatggccaggcgcgagctgaaaaagctcaagatcgaggcccgatccgtggagcgctataagaagctccacattggcatggagaacaagatcatgcagctgcagcgcaaagttgatgagcagaacaaagactacaaatgcctcatggagaaactgaccaatctggaaggaatatacaactctgagactgagaaactacgaaatgacttagaacgtcttcagctaagtgaggaagaagcaaagattgccaccggacgggtcctcagtctgcaggaagaaattgccaagctccggaaagacctggaacaaactcagtcagagaaaaaatccattgaagaacgtgcagatagatacaaacaagaaactgagcagctggtatcaaatctgaaggaagaaaatactttgctgaagcaggaaaaggaggccctcaatcaccttatcgtggagcaggctaaggaaatgacagagactatggagaagaagttggtagaagaaacaaaacaactggaacttgatcttaatgatgaaaggctgagatatcagaaccttctgaatgagttcagtcgcttggaagaacggtatgatgacctcaaggaagagatgactctgatggtgaacgtgcctaagcctggacacaagagaacagactccacccacagcagcaatgagtctgaatacacctttagctctgaaattacggaaactgaagacattccatcaaggacagaggagccaagcgagaagaaggtgcctctggacatgtcattgttcctcaagctccagaagcgggtcacagagctggagcaggagaagcaggtgatgcaggatgagctggaccgcaaggaggagcaggtgctccgcagcaaggccaaggaagaagaaagaccgcaaattagaggtgcagaactggagtatgagtcacttaagcgtcaagaactagaatcagaaaacaaaaaactgaaaaatgagctaaatgagttacgcaaggcactcagtgagaaaagtgccccggaggtgaccgctccaggtgcaccagcctaccgtgtcctcatggagcagctgacctctgtgagtgaggagctcgatgtccgcaaggaggaggtcctcatcttgaggtctcagctggtgagccagaaagaggccatccaacccaagaatacaatgacagattccacaatacttttggaagatgtacaaaaaatgaaagataaaggcgaaatagcacaagcatacattggtttgaaagaaacaaacagatcatctgctatggattgccatgagttgaatgaggatggagagctgtggctggtttatgaagggttaaaacaagccaacaggctcctggaatcccagctccagtcgcagaagaggagccatgagaatgaggctgaagccctccgcggggagatccagagcctgaaggaggagaacaaccggcagcagcagctgctggcccagaacctgcagctgcccccagaggcccgcatcgaggccagcctgcagcatgagatcacccggctgaccaacgaaaacttgtattttgaggaattatatgcagatgaccctaagaagtatcagtcatatcggatttcactgtacaaacggatgattgatttgatggaacaacttgaaaaacaagataagactgtccggaaactgaaaaaacaactgaaagtatttgccaaaaaaattggtgaactagaagtgggccagatggagaacatctccccaggacagatcattgatgaacccatccgtccagtcaacattcccaggaaagaaaaggatttccaaggaatgctggaatacaagaaggaggatgagcagaaacttgttaagaacctgattctggaactgaagccgcgtggtgtagcagtcaatttaattccagggttaccagcatatatcctctttatgtgtgtgcgacatgctgactacctgaatgatgatcagaaagtaaggtcattgctaacatcaacaattaacagcatcaaaaaagtattaaagaaaagaggtgatgattttgaaactgtctccttctggctctctaacacatgccgatttttgcactgcttgaagcagtacagtggagaagagggctttatgaaacacaacacatctcgccagaatgaacactgcctcaccaattttgacctggctgagtaccgacaggtgctaagtgacttggccattcagatctaccagcagcttgtgcgggtgttagagaacatccttcagccaatgatcgtctctggcatgctggagcatgaaaccattcagggcgtatctggggtgaagcccacagggctaagaaagcggacttccagcatcgccgatgagggcacctacacgctggactccatcctccggcagctcaactccttccattcggtcatgtgtcagcacggcatggaccccgagctaatcaagcaggtggtcaagcagatgttctacattgtgggggccatcaccctcaacaacctcctcctgcggaaggacatgtgctcctggagtaaaggcatgcagatcaggtacaatgtcagtcagctggaagaatggttgcgtgacaagaatctgatgaacagtggggctaaagaaaccctggaacctctcattcaggctgctcagcttttgcaagtgaaaaagaaaacagatgatgatgcagaagccatttgttccatgtgcaatgcgttaactactgcccagattgtcaaagtgttaaatttgtatactccagttaatgagtttgaagaacgagtgtctgtatcgtttattcgtactatacagatgcgtttacgagacaggaaggactctcctcagctgctcatggatgctaaacacatctttcctgtcaccttcccttttaacccatcctctctcgcgctggaaaccatccagatcccagccagcctgggcctgggcttcatatcacgggtctgaacgtgagggcaaggcaaacagggacagtacatttcttgcctgaaataagaacccattatttccagtgagctactgaaaacacatttttaaagagaaagtactgattatctcctaaacaagaggttcttaactggaaatctccctagaatactttcatcaccttggaaagaaagataggctcctttgtactgtgttacctttatagcaacactcatccgcgagcagttaggtatcctgagtttacatgcaggtgaatgacgaaaggaaggaagataaatgtgtcttcagatgccagcatctaaatggtataaaaaaggtaaattccagatatgagctgttgttaggaaggtgccaacaaagaacgtcgtctgcactacgcagaactgaaagaaaaatcgccgttgagtacgtatcatatcagtttaggaatcagttatgctgatattgtcaaactggatcaaagaaataaactggcaatatgtaaagtaattggtcaagtaacttgcttatatgtgtcactatgatacagagatactaagagaatgttggtttgctgtatagcatagaagtccatttgtactgtagtttactgagcattttaaattgctgctacataccgtgttctttaaaatgtaagcgatattcttagtaggcactacaacaataagcttctcttttatcaactctgtttacaattcagtccggtcacagttttaactggagtatgtgcgaatatctacagattcctctgcccaagtagcagacactgggaagtcctgcagtaacatgaccaaatgtttgacatttaggggtagaattagacaaagtggctcttgttggtgtcattatttattcagggtgtatgacaccgatgtgcttgttagttttccctgggtggatatcacatcaggggacagtgttctgtgaagtgacttatttttagttcccagatctgatgcctgcagtgcatattttcaaccatgacaggttttctttcttcttcttaatttattaagaattaatctcagtcactatctagagaggattgtcagaatattcatgattcaggtcttgaaacttgattagcctataagttatgcaaaagaaggtgtataataaataattatgattcagtttttttaggctgtggaacttctgtaaatgttctcagtactactagatactttaaaaagcatcgtagtagtaatactttaagatttgtataagaatataagaagattgctgaattttacagaggatttccttcaataagacccacattctataagttttcattctgaaatctgaataaatatattctccatttttctagaaatcttatacaataaatctttcaggttgtgcaaaagcaagttcttagctttcctcagaaactgtggatctgaattacaatcataaatttatataatttaactgttagatggtctagaaaaaatgacatcttattaaaatatgtgcaatattattaatggaaatcaaacagtttcaagtcagtgataaaaattgttattagaagatagtcaacttatttgggcttcaaattcctcgtttatacaataagagggttggacggctgattccgaaggtcccttccacatctgagctcctctcctcccagtgcctggatcagagagaaatgagctgctcttactcagtaagttcaccctctcatggaaagatcagtgttcggtgcctgttaattctgagggattaataaaatagaaagtcacaa

SEQ ID NO: 25 - DNA, 401 bp, Equus caballus
  misc_feature (201)..(201): n is c or t
gctcctaaaagaggcccttccacaccatcacaccagggttcctatgtgggactccattcacagcccacacataggaaactgccaggaccatctgtttttttgtgatgatgattcaatgactatttgtttttcatttttttcacaactggtctgtgcctggcagttggctggataacccaccaaccactcctaacccctctngctcacctccactgcagaggctggaaaagctaatcgcttcaccagcctcccttgcagctagggttgagcacatcgtattcccggaactgaggagacacaaagcacaaggacaaaaagccgaaatgctgagcagggcaaagcagaaagactgaggacattcccatcctcggtgtcaccgctgagctgccagatcaacacca

SEQ ID NO: 26 - DNA, 401 bp, Equus caballus
  misc_feature (201)..(201): n is a or g
tgcagcaacaatattttaagttccctgatggctggcatccaccaatctggagaattttctatatttgtggcctaaagttccataaaacatggataatgacaagtcctccgtgaagattaggccattggctgtggaaggaaataagcctgaggacttgccctgctgggagtgaacactcctgtcacagtgctgactaagcantacgcgaggaacaagaattaatctgtcctccaacggtgggtaagggactcccacaagactacacagtgagttttagagctgggggcagaaatcaggccctgcaactcccaggctgaggttctttcaaccaaatcacattcccctcccctctactttggaattcccctatgaaattagaattaaaaagtttcccacttctg

SEQ ID NO: 27 - DNA, 401 bp, Equus caballus
  misc_feature (201)..(201): n is c or t
agttgttaccctgaaaaacatttttggtcttatcagtcctctatttaaaaacctctgttggcatttcattgcttacaagttaaaagccgaattcacactctcggcccctctcaccccactcttctagcccctatcctggtttcttgccccccaggatttcccatcttctgatgtgacaagcctttttatgactcagggccngttctgatttgatttctttggcccggactgctttatttctctcctttctttcttttgccaactaaactcacgttcttcctttaggagccatatcaaaagtcacctcttcagggacgtcctccctaattcttcaggcagagtgtgcagctcagccctctgtgttcccttatcctttgtggcccatggagcttttgcatttc

SEQ ID NO: 28 - DNA, 401 bp, Equus caballus
  misc_feature (201)..(201): n is t or g
attatgtctaactgtaattttcgaaagctgctaaaataaacatgtagtgcttttgcaataaaaaataaacaataaaaagagagaacgagaacgtctaaagaaaacagtgaggcaattcgaacccaaccagaggcccacggcagcatctgggattactgagctctgtgaccgacacctaattggacacagactgcctagaantgtccctcatttgttttctgggcaaggccattcataaagactcattactccaaaacaaccagcccaagagcccctcaatgtccaactccagacacacgaaggagtaacaatggccagaaaggccctgaggctttctccagagaactgcagtcactaatcaattcaaagacaaacgaggtttctccctgtaaaggaaaatg

SEQ ID NO: 29 - DNA, 15324 bp, Equus caballus
gcccagcccgcggccccctcctcctattccccgacctcagccccggcctctcgggcctcgacatcatgggtgacggagcagagggcgaggatgaggtccagtttctgcgaacggatgacgaggtggtcctgcagtgcaatgccaccgtgctcaaggagcagctcaagctctgcctggccgccgagggcttcggcaatcgcctctgcttcctggagcccaccagcaacgcccagaatgtgccccccgatctggccatctgttgcttcgtcctggagcagtctctgtcggtccgagccctgcaggagatgctggccaacacggtggaggccggagtggagtcgtcccagggcgggggacacaggacactgctgtacggccatgccatcctgctgcggcatgcgcacagcggcatgtatctgagctgcctcaccacctcccgctccatgactgacaagctggccttcgacgtgggactgcaggaggatgcaataggagaggcctgttggtggacgacgcacccagcctccaagcagaggtcagaaggagaaaaggtccgcgtcggggatgacctcatcctcgttagtgtctcctccgagcgctacctgcacctgtcgacggccagtggggagctccaggttgacgcctccttcatgcagacactgtggaacatgaaccccatctgctctggctgcgaagaaggctatgtgaccgggggccacgtcctccgcctctttcacggacacatggatgagtgtctgaccatttcgcctgctgacagtgacgaccagcgcagacttgtccactatgaggggggcgctgtgtgcacccatgcccgctccctctggagactggagccactgagaatcagctggagcgggagccatctgcgctggggccagccactgcgcatccggcacgtcaccaccgggcggtacctggcgctcaccgaggaccagggcctgatggtggttgatgccagcaaggctcacaccaaggccacctccttctgcttccgcgtctccaaggagaagctggatatgggccccaaacgagacgtggagggcatgggccccccggagatcaagtacggggagtcgctgtgctttgtgcagcatgtggcctcgggcctgtggctcacctatgctgccccggaccataaggccctgcggctcggcgtgctcaagaagaaggccatgctgcaccaggaaggccacatggacgatgccctttcgctgacccgctgccagcacgaggagtcccaggctgcccgcatgatttacagcaccgctggcctctacaaccagttcatcaagggcctggacagcttcagcggaaagccgcggggctctgggccgccggccggcacggcgctgcccatcgagggcgtcatcctgagcctgcaggacctcatcggctacatggagccgccctccgaggagctgcagcacgaggagaagcagagcaagctgcgcagcctgcgcaaccgccagagcctcttccaggaggaggggatgctggccctggtcctgaattgcatcgaccgcctaaatgtctacactactgctgcccactttgccgaatttgcaggggaggaggcagccgagtcctggaaagagattgtgaacctgctgtatgaacttctggcctctctgatccgtggcaatcgcaccaactgtgccctcttctccaacaacttggactggctggtcagcaagctggatcggctggaggcctcgtccgggatcctggaggtgctgtactgtgtcctgatcgagagccccgaggtcctgaacatcatccaagagaaccacatcaagtctatcatctccctcctggacaagcatgggaggaaccacaaggtcctggacgtgctgtgttccctgtgtgtgtgcaatggcgtggccgtgcgctccaaccaagatctcattaccgagaacttgctccctggccgcgagcttctgctgcagacaaacctcatcaactatgtcaccagcatccgccccaacatcttcgtgggccgagcagagggcaccacgcagtatggcaaatggtactttgaagtgatggtggacgaggtggctccattcctgacagctcaggccacccacctgcgggtgggctgggccctcaccgagggctacagcccctaccccgggggcggcgagggctggggcggcaatggggtcggcgatgacctctattcctacggcttcgatgggctgcatctctggacaggacacgtggcacgcctggtgacttaccccgggcagcacctcctggcccctgaggacgtggtcagctgctgcctggacctcagcgtgccgtccatctccttccgcatcaatggctgtcccgtgcagggcgtctttgaggccttcaaccttgacgggctcttcttccctgtggtcagcttctcggctggtgtcaaggtacggttcctccttggtgggcgccatggcgaattcaagttcctccctccccctggctatgccccgtgccatgaggctgtgctcccgagagagcgactccatctggaacccatcaaggagtaccggcgagagggcccccgggggccccatctggtgggccccagccgctgcctctcacacactgactttgtgccctgccccgtggacactgtgcagattgtcctgcctccccatctggagcgtattcgggagaagctggcagaaaacatccacgaactctgggcgctgacccgcatcgagcagggctggacctatggcccggttcgggatgacaacaagaggctgcacccgtgtctggtcaacttccacagcctcccggagcccgagcggaattacaacctgcagatgtcgggggagacgctcaaaaccctgctggcactgggctgccacgtgggcatggcagatgagaaggcggaggacaacctgaagaagacgaagctccccaagacgtacatgatgagcaacgggtacaagccggcaccgctggacctgagccacgtgcggctcacgccagcgcagacgacgctggtggaccggctggcagagaacgggcacaatgtgtgggcgcgagaccgcgtggcccagggctggagctacagctccgtgcaggacatccccgcacgccgaaacccacgccttgtgccctatcgcctgctggatgaggccaccaagcgcagcaaccgggacagcctctgccaggccgtgcgcaccctgctgggctatggctacaacatcgagccgcccgaccaggagcccagtctggtggagagccagtctcgttgggaccgggtgcgcatcttccgggcagagaaatcctatgcggtgcagagtggccgctggtacttcgaattcgaggcggtcaccacaggcgagatgcgagtgggctgggcgaggcctgagctgaggcctgacgtggagctgggagctgatgagctggcctatgtcttcaacgggcaccgcggccagcgctggcacttgggcagtgaaccatttgggcgtccctggcagccgggtgatgtcgtgggctgcatgatcgacctcacagagaacaccatcatcttcaccctcaacggcgagatcctcatgtccgattcaggctccgaaacagccttccgggatattgagattggcgatggattcctgcctgtctgcagcctggggcctggccaggtgggccacctgaacctgggccaggacgtgagctccctgcggttctttaccatctgcggcctccaggaaggctttgagccattcgccatcaacatgcagcgcccggtcaccacctggttcagcaagagccttccgcaatttgaggccgtgccccttgagcacccccactatgaggtggctcgtgtggacggcaccgtggacacgcccccctgcctgcgcctgacccaccgcacctggggctcccagaacagtctagtggagatgctctttctccggctgagccttccagtccagttccaccagcacttccgctgcaccgcaggggccacccccctggcaccccctggcctgcagccccccgcggaggacgaggcccgggcagcggaacctgaccctgactatgaaaacctgcgccgctcagctgggcgctggggcgaggctgaggtgggcaaagagggaaatgccaaggagggggcaccgggggccacgccccaggctgtcgtggaggcccagcccgccagggtggagaatgagaaggatgccaccacagagaagaacaagaagagagggttcctgttcaaggccaagaaggccgccatgatgacccagccaccagccacccctactctgccccggctccctcacgaggtggtgcccaccaacgaccgtgacgaccctgagatcatcctcaacacgaccacgtactattactccgtgagggtcttcgctggccaggagcccagctgcgtgtgggtgggctgggtcacccccgactaccaccagcacgacatgaacttcgacctcagcaaagtccgggcagtgacggtgaccatgggggacgaacaaggcaacgtccacagcagcctcaagtgcagcaactgctacatggtgtggggcggagacttcgtgagccccgggcagcagggccggatcagccacacggaccttatcatcggctgcctggtagacttggccactggcctaatgacctttacggccaatggcaaagagagcaacacctttttccaggtggaacccaacacaaagctgtttcctgccgtctttgtcctgcccacccaccagaatgtcatccagtttgagctggggaagcagaaaaacatcatgccactgtcagccgccatgtttctgagcgagcgcaagaacccggccccgcagtgcccgccacggctcgaggtacagatgctgatgcccgtctcgtggagccgcatgcccaaccacttcctgcaggtggagacgcggcgggccggcgagcggctcggctgggccgtgcagtgccgggagccgctgaccatgatggccctgcacatccccgaggagaaccggtgcatggacatcctggagctgtcggagcgcctggacctgcagcggttccactcccacaccctctgcctctaccgcgctgtgtgcgccctgggcaacaaccgcgtggcgcatgctctgtgcagccacgtggaccaggcgcagctgctgcacgccctggaggacgcgcacctgcccggccccctgcgtgcgggctactacgacctcctcatcagcatccacctcgaaagtgcctgccgcagccgccgctccatgctctctgagtacatcgtgccgctcacggaggagacacgcgccatcacgctcttcccgcccggaagaaaggcggataacggcccccgccactatggcctgcctggcgtcggcgtcaccacctcgctgcggcctccgcaccatttctcagccccctgtttcgtggctgccctgccagcttccgggttggcagacgccccggcccgcctcagccccagcatccctctggaggccctgcgggacaaagcactgagaatgctgggggaggccgtgcgagacggtgggcagcacgcacgcgaccctgtcgggggctctgtggagttccagtttgtgcccgtgctcaagcttgtgtccaccctgctggtcatgggcatctttggcgatgaggatgtgaaacaaatattgaagatgattgagcctgaagtattcactgaggaggaagaggaagaggaggaggaagaggaggaggaggaagaagatgaggaggagaaggaggaggatgaggaggaagaggcacaggagaaagaagatgaagaaaaagaggaagaggaaccagcagaaggggaaaaaggagaaagcttggaggagggactgctccagatgaagctgccggagtctgtgaagttacagatgtgccacctgctggagtatttctgtgaccaagagctgcagcaccgtgtggagtccctggcagcctttgcagagcgctatgtggacaggctccaggccaaccagcgggaccgctacggcctcctcatgaaagccttcaccatgtctgcagctgagaccgcccggcgtactcgcgagttccgctcgccaccccaggagcagatcaacatgctattgcacttcaaagatgaggaggatgaggaagattgtcctctccctgaagacattcgacaggatttgctcgaatttcatcaagacctgctggcacactgtggaattcagctggagggcgaggaggaggaaccggaggaagaggccaccctgagtagccgcctgatgagcctgttggagaaagtgcggctggtgaagaagaagaaagagaagcctgaggatgagccgcccgcagaggagagcaaaccccagtccctgcaggagctcgtgtcccacacggtggtgcgttgggcgcaagaggacttcgtgcagagcccagagctggtgcgtgccatgttcagcctcctgcaccggcagtacgacggcctcggggagctgctgcgcgccctgccccgggcctacaccatctcaccgtcctccatggcggacaccatgagcctgcttgagtgcctgggccagatccgctcgctgctcatcgtgcagatgggcccccaggaggagaacctgatgatccagagcatcgggaacatcatgaacaacaaggtcttctatcaacacccgaacctgatgcgggcgctgggcatgcacgagacggtcatggaggtgatggtcaacgtcctcgggggtggcgaatccaaggagatccgcttccccaagatggtgacgagctgctgccgcttcctctgctacttctgtcgcatcagccggcagaaccagcgctccatgttcgaccacctgagctacctgctggagaacagcggcatcggcctgggcatgcagggctccacgcccctggatgtggcggctgcctccgtcatcgacaacaacgagctggccctggcgctgcaggagcaggacctggagaaggtggtgtcctacctggcaggctgtgggctccaaagctgccccatgctcctggccaaagggtacccggacatcggctggaacccctgcggcggagagcgctacctggatttcctgcgcttcgcggtcttcgtgaatggagagagcgtggaggagaacgccaacgtggtggtgcggctgctcatccgcaagcccgagtgcttcgggccggccctgcgaggggagggcggctcggggctgctggccaccatcgaagaggccatccgcatctccgaggaccccgcgcgggacggccccggtgtccgcagggaccggaggcgcgagcacttcggcgaggagccccctgaggaaaaccgggtgcacctgggacatgccatcatgtccttctacgctgccttgatcgacctgctgggacgctgtgcgccagagatgcatctaatccaagccggcaaaggcgaagctctgaggatccgcgccatcctgcgctccctcgtgcccctggacgacctcgtgggcatcatcagcctccctctgcagatccccaccctgggcaaagatggggctctggtgcagcccaagatgtcggcatccttcgtgcccgaccacaaggcttccatggtgctcttcttggaccgcgtgtatggcatcgagaaccaggacttcttgttgcacgtcctagacgtggggttcctgcctgacatgcgggcggccgcctcgctggacacggccactttcagcaccacggagatggcgctggcgctgaaccgctacctgtgcgtggccgtgctgccgctcatcactaagtgcgcgccgctcttcgcgggaaccgagcaccgcgccatcatggtggactccatgcttcacacggtgtaccgcctgtcccgcggccgctcgctcaccaaggcgcagcgcgacatcatcgaggactgccttatggcgctctgcaggtacatccgcccgtctatgctgcagcacctgctgcggcgcctggtgttcgacgtgcccatccttaacgagttcgccaagatgccgctcaagctcctcaccaaccactatgagcgttgttggaagtactactgcctcccgacgggctgggccaacttcgggatcacgtcagaggaagagctgcacctcactcggaaactcttctggggcatctttgactcactggcccataagaagtacgaccaagagctgtaccgcatggccatgccttgtctgtgcgccatcgcaggggccctgccccccgactatgtggacgcctcgtactcatccaaggccgagaagaaggccacggtggacgctgaaggcaactttgatcctcggcctgtggagaccctcaatgtgatcatcccagagaagctggactccttcattaacaagttcgctgagtacacacatgagaagtgggccttcgacaagatccagaacaactggtcctatggggagaacatagatgaggaactgaagacacaccccatgctgaggccctacaagaccttctcagagaaggacaaagagatttaccgctggcccatcaaggagtccttgaaggccatgattgcctgggaatggacgatagagaaggccagggagggtgacgaggagaagacggagaagaaaaaaacgcggaagatatcccaaagtgcccagacctatgatccgcgcgaaggctacaacccgcagccccccgacctcagcggagttaccttgtcccgggagctgcaggccatggcagagcaactggcggagaattaccacaacacgtgggggcggaagaagaagcaggagctggaggccaagggtggtggctcccaccccctgctggtcccctacgacacgctcacggccaaggagaaggcacgagatcgagagaaggcccaggagctgctcaagttcctgcagatgaacggctatgccgtcaccagaggccttaaggacatggagctggacacgtcttccattgagaagcgcttcgccttcggcttcctgcagcagttgctgcgctggatggacatttcccaagagtttatcgcccacctggaggctgtggtgagcagtggacgagtagaaaagtccccgcacgaacaggagattaaattctttgccaagatcttgctccctttgatcaaccagtacttcaccaaccactgcctctatttcctgtccacaccggccaaagtgctgggcagtggcggccacgcctccaacaaggagaaggaaatgatcaccagcctcttctgcaagcttgccgcccttgtccgccaccgggtctctctcttcgggacagatgctccagctgtggtcaactgtcttcacatcctggcacgctccctggatgccaggacggtgatgaagtccggccccgagatcgtgaaggccggcctccgctccttcttcgagagtgcctcggaggacatcgagaagatggtggagaacctgcgcctggggaaggtgtcgcaggcgcgcacgcaggtgaagggcgtgggccagaacctcacctacaccaccgtggccctgctgcctgtcctcaccacgctcttccagcacattgcccagcaccagttcggagacgacgtcatcctggatgacgtccaggtctcttgctaccgaacgctgtgcagtatctactctctgggaaccaccaggaacccttacgtggaaaagctgcggccagccctgggggagtgcctggcacgcctagcagcggccatgccagtggcgtttctggagcctcagctgaacgagtataatgcctgctccgtgtacaccaccaagtctccccgcgagcgggccatcctggggctccccaacagcgtggaggagatgtgtcccgacatcccggtgctggagcggctcatggcagacatcggggggctggccgagtcgggggcccgctacacagagatgccgcacgtcattgagatcacactgcccatgctgtgcagctacttgccccgctggtgggagcgcgggcccgaggcgcccccgcctgccctgcccgccggggcgcccccgccctgcacagccgtcacctccgaccacctcaactccctgttgggaaatatcctgcgaatcatcgtcaacaacctgggcatcgatgaggccacgtggatgaagcggctcgctgtgttcgcccagcccatcgtgagccgggcccggccggagctcctgcactcgcactttatccccacaatcgggcggctgcgcaagcgcgcgggcaaggtggtggccgaggaggagcagctgcgcctggaggccaaggccgaggcccaggagggcgagctcctggtgcgggacgagttctctgtgctctgccgcgacctctacgccctctacccgctgctcatccgctacgtggacaacaacagggcgcactggctgacggagcccaatcccagcgcggaggagctgttccggatggtgggcgagatcttcatctactggtccaagtcgcacaacttcaagcgcgaggagcagaactttgtggtccagaatgagatcaacaacatgtcgtttctgaccgccgacaacaagagcaaaatggccaaggcaggagatgtacagtcagctggctcggaccaggaacgcaccaagaagaagcgccggggggaccggtactccgtgcagacgtcgctgattgtggccacgctcaagaagatgctgcccatcggcctgaacatgtgtgcacccactgaccaggacctcatcatgctggccaagacccgctacgccctgaaagacacggatgaggaggtccgggaatttctgcagaacaaccttcaccttcagggaaaggtcgaaggctccccttccctgcgctggcagatggccctgtaccggggcctccccggccgcgaggaggacgccgacgaccccgagaagatcgtgcgcagagtccaggaagtgtctgccgtgctctaccacctggagcagatcgagcacccttacaagtccaagaaggccgtgtggcacaagctcttgtccaagcagcgccggagggcagttgtcgcctgtttccgcatgacccccctgtacaacctgcccacgcaccgggcatgtaacatgttcttggagagctacaaggcggcatggatcctgactgaagaccacagttttgaggaccgcatgatagatgacctttcaaaagctggggagcaggaggaggaagaggaagaagtggaggagaagaagccagaccccctgcaccagctggtcctgcacttcagccgcactgccctgaccgaaaagagcaaactggaagaggattacctgtatatggcgtacgccgatatcatggccaagagctgccacctggaggaaggaggggagaacaccgaagctgaagaagacgaggttgaggtttcctttgaggagaaagagatggagaagcagaggctgctgtaccagcaggcgcggctgcacacccggggcgccgcggagatggtgcttcagatgatcagtgcctgcaaaggagagacgggcgccatggtgtcctccaccctcaagctgggcatctccatcctaaatggaggcaatgcagatgtgcagcagaaaatgctggattatctgaaggacaagaaggaagtcggcttcttccagagcatccaggcgctgatgcagacatgcagcgtcctggatctcaatgcctttgagagacagaacaaggcagaggggctgggcatggtgaacgaggacggaaccgtcatcaaccgccagaacggagaaaaggtcatggcagatgatgaattcacccaagacctgttccgattcctgcaactgctctgcgaggggcacaataatgatttccagaactacctacggacacagacaggcaacacgaccactattaacatcatcatctgcacggtggactacctcctgcggctgcaggagtccatcagcgacttctactggtactactccggcaaggatgtcatcgaggagcagggcaagaggaacttttccaaggccatgtcggtggcgaaacaggtgttcaacagcctcaccgagtacatccagggcccctgcaccgggaaccagcagagcctggcgcacagccgcctctgggacgccgtggtgggattcctgcacgtgtttgcccacatgatgatgaagctcgctcaggactcgagccagattgagctgttgaaggagctgctggatctacagaaggacatggtggtgatgttgctgtcactactcgaagggaacgtggtgaacggcatgattgcccggcagatggtggacatgctggtggaatcctcatccaacgtggagatgatcctcaagttcttcgacatgttcctcaagctcaaggacatcgtgggctctgaggccttccaggactacgtcaccgatccccgtggcctcatctccaagaaggacttccagaaggccatggacagccagaagcagttcactgctccggaaatccagttcctgctttcgtgctccgaggcggatgagaacgagatgatcgatttcgaggagttcgccaaccgcttccaggagccggcccgcgacatcggcttcaatgtggcggtgctgctgaccaacctgtcggagcacgtgccgcacgacccgcgcctgcgcaacttcctcgagctggccgagagcatcctggagtacttccggccctacctgggccgcatcgagatcatgggcgcctcgcgccgcatcgaacgcatctacttcgagatctcggagaccaaccgcgcccagtgggagatgccccaggtcaaggagtccaagcgccagttcatcttcgacgtggtgaacgagggcggcgagtcggagaagatggagctgttcgtgagcttctgcgaggacaccatcttcgagatgcagatcgccgcgcgcatctcggagcccgagggcgagccggaggaggacgaggacgagggcgcggccgaggcggccgtcgagggcgcggaggagggcgcggcggggcccgagggcgcggcggccacggcggcggcgggggtctcggccagcctggcggcggcggcgacccgggccctgcggggcctcagctaccggagcctgcggcggcgcgtgcggcggctgcggcggctcacggcgcgcgaggcggccaccgcggtggcggcgctgctctgggctgcgatggcgcgcgcgggcgcggcgggcgcgggagcggctaagggtgcgctgcgcctgctctggggctcgctcttcggcggcgggctggtggagggagccaagaaggtgacggtgaccgagctcctggccggcatgcccgaccccacgagcgacgaggtgcacggcgagcagccggccgggcccgggggcgacgcggacggcgagggcgccggcgagggcgcaggagacgcggcggagggcgcgggcgacgaggaggtggcggtgcacgaggccgtcccgggaggcgccgacggagccgtggccgtggccgaggggggccccttccggcccgaaggggggggcggcctcggggacatgggtgacacgacgccggcggagccgcccacgcccgagggctcccccatcctcaagaggaagctgggggtggatggagaggaagagcagctgcctccggaaccagagccagagcccgagcccgagaaagccgacgctgagaatggggagaaagaagaagtccctgaacccccaccagagccccccaagaaggcagaagcccctcccccaccccctccaaagaaggaggaagccagaggtgggggcctggaattctgggcagaactggaggtgcagagggtgaagttcttgaactacctctcccggaacttttacaccctgcggttccttgctctcttcctcgcttttgccatcaacttcatcctgctgttttataaggtctcagactctccaccaggggaggatgacatggagggctcagcagctggggacttgtcaggcgcagggtctggtggcggctctggctggggctcaggggccggtgaggaggcggagggcgatgaggacgagaacatggtgtactacttcctggaggagagcacgggctacatggagcctgccttgcgttgcctgagcctgctgcacacgttggtggcgtttctctgcatcattggctataactgtctcaaggtgcccctggtgatctttaagcgggagaaggagctggcccgaaagctggagttcgacggcctctacatcacggagcagccggaggacgacgacgtgaaggggcagtgggaccgactggtgctcaacacgccgtccttccccagcaactactgggacaagtttgtcaagcggaaggtcctggacaagcatggggacatctatgggcgggagcggatcgccgagctgctgggcatggatctggccacactggtgatcacggcccacaatgagcgcaagcctgagccaccgccggggctgctcacctggctcatgtccatcgacgtcaagtaccagatctggaaattcggggtcatcttcacagacaattctttcctctacctgggctggtacatggtgatgtccctcctgggacactacaacaacttcttctttgctgcccacctcctggacatcgccatgggggtcaagacgctgcgcaccatcctctcctccgtcacccacaatgggaaacagctggtgatgacggtgggcctcctggcggtggtggtctatctgtacaccgtggtggccttcaacttcttccgcaagttctacaacaagagcgaggacgaggacgagcctgacatgaagtgtgacgacatgatgacgtgttacctgttccacatgtacgtgggcgtccgagcgggcggaggcatcggggatgagattgaggacccagccggcgatgagtatgagctgtaccgagtggtcttcgacattaccttcttcttctttgtcatcgtcatcctgctggccatcatccagggtttgatcattgacgcttttggcgagctccgagaccaacaagagcaagtgaaggaagatatggagaccaagtgcttcatctgcggcatcggcagcgattacttcgacacgacgccgcacgggttcgagactcacacgctagaggagcacaacctggccaattacatgtttttcctgatgtatctgataaacaaggacgagacagaacacacgggtcaggagtcttatgtctggaagatgtaccaagagagatgttgggatttcttcccggctggcgattgtttccgcaagcagtacgaggaccagcttagctgagacaccccagctggcccttcacccccacctcaagtgccttattcttacagcaagccccttagcccccaaaaccctccccccaaggcggccgggggagaggtggtcatgtactggagaaataaattctgtgccacacccctga

SEQ ID NO: 30 - DNA, 6775 bp, Equus caballus
aggtgaaaagctttgactggtgtgggagctagcctccaagatgggccctggtgaccctgcctcctggtgttcacgcccacgtgcagtcccctgccacactgaattactgagggctgacctgtgccgccaataggatgcagtggaagtgatggtgtgtgacttctgaggctaggtcatgagggactgctgcttctaccttgctcccttggatcgcctgctctggaggaagctacctgccatgtcctgaggacactcaagcagccctgtggagatgccaggatggagcagaactgaggcctcccgccaacagccagcatgaacttgtgagccatatcagggggccaacatggaagtgggtcctcctgcccctgtcagaccttcagataaccacagccacggccaacagcttggctacaacctcttgagagacctcgcgccagaaagacctaatgacactgctcctgaattcctgacccctggaaactgggtaactagcatggtcaatgcaggagcgatgagtggctctggaaacctgatggatttcctcgatgagccattccctgatgtggggacgtatgaggacttccacaccatcgactggctgagggaaaagtctcgggacaccgacagacacagaaagataaccagcaaaagcaaggagtccatatgggagttcatcaagagtttgctggatgcctggtcaggatgggtggtgatgctgctcatcggcctgctggcgggcaccttggctggggtcatcgatctcgctgtcgactggatgactgacctgaaggagggggtctgcctgtctgccttctggtacagccatgagcagtgctgctggacttccaacgagaccacttttgaggacagggacaagtgtcccctgtggcagaaatggtcggagctgctggtgaatcagtcagagggggccagtgcttacattctgaattacctaatgtacatcctgtgggcgttgctgtttgcatttctggctgtctccctggtgcgcgtatttgcgccatacgcctgtggctctggtataccagagataaagaccattttgagcggctttatcatcaggggctacttggggaagtggaccctgctgatcaagactgtcaccctggtgctggtagtgtcctcgggcctgagccttgggaaagaagggccgctggtgcacgtggcttgttgctgtggcaacttcttcagcagccttttctccaagtacagcaagaacgagggcaagaggcgtgaggtgctttcagctgcagctgctgccggagtctctgttgcctttggtgctccaatcgggggtgtgcttttcagtctagaggaggtcagttactactttcccttgaagaccttgtggaggtcctttttcgcggccctggtggcagccttcactctgcgatccatcaacccctttgggaacagccgccttgttctcttttacgtggaatatcacacgccctggtacatggccgaactcttccccttcatcctgcttggggtctttgggggcttgtggggaaccctcttcatccgctgcaacatcgcctggtgcaggaggcgcaaaaccaccaagctggggaagtacccggtgctggaggtcatcgcggtgactgccatcaccgccatcatcgcctaccccaatccctacacacgccggagcacaagcgagctcatttccgagctgttcaatgactgtggggccctcgagtcctcccagctctgcgactacatcaacgaccccaacatgacccggcctgtggatgacatcccggaccggccggctggagtcggggtttacacggccatgtggcagctggccctggctctgatcttcaaaatcgtcattaccatatttacctttggcatgaagatcccgtcgggcctcttcatccccagcatggctgtgggagcaatggcgggcaggatggtgggaatcggcgtggagcagctggcttaccatcatcatgactggatcatcttcaggaactggtgcaggcccggagcagactgtgtcaccccaggactttacgcaatggtgggagctgcagcctgcctaggtggagttaccaggatgacggtgtcattggtggtcatcatgtttgaattaactggtggtctagagtacattgtgcccctgatggcggcagctgtgaccagcaagtgggtggctgatgcctttgggaaagaaggcatctatgaggcccacatccacttaaacgggtacccatttctggacgtgaaggacgagttcacccaccgcacgctggccactgacgtcatgcggccgcggcggggagagccaccactgtccgtgctcacccaggacagcatgaccgtcgaggatgtggagacgctcatcaaggagaccgactacaatggcttccccgtggtggtctccagggactctgaacgcctcattggatttgcccagaggagggaactgattctagcaataaagaatgccagacagaggcaggaaggcatcgtgagcaattccatcatgtacttcacagaggagccccctgagctaccggccaacagcccacaccccctgaagctgcggcgtgtcctaaacctcagccctttcacggtcacggaccacacccccatggagacggtggtagacatcttccggaaactggggctccggcagtgcctggtgacacggagtgggagacttcttgggatcatcacgaaaaaggatgttctgagacatatggcccagatggcaaaccaggaccctgaatccatcatgtttaattagaaacaaggtggcaattattttgaggaaaacacaacaactgtgtcattttaaaagaaagaaacaaatgatatgttattatcctaatgaacgatcatgcgatcatgcgctgtaggcagtggaaacaaaagctttgtttgaaaggaagggaaggagaatgaaacttttttttttttaatacatcaatgagtaggtattttatagctttaaccccttatgagtttcaagctgtgtttcttaatgagtttactaactgctatgggggcatgagggtggatgtaaaccatgtggtttgtacaaggacatggaacacacgtgctgagtcaagaaatgtttgccccttctgcttgaggctgatgcttatgaagctttgagtcccaaaggcaaagggtgttggcatgttagcgtccttatttattggttcctgaagttttgctgctatgttactgaatcagactaaagatatttgcacttactttgttggaaaagaaaaagaaattaaatttgaacatagtgaaagctgcaagtatgccagtggtttcactcatgaccatcccatttcttgctcctgttctcagcctgttattttgcttagtcatcagtctctgagccaacatcagggtcacctgctatgatgagtatgaagaaatcatttctctatgcaaagactagcatcgtgggactgcacgacaaactgctggagcgtttagtgcttcactgtatttcctcccatacgaagacattcatccttattttgagggtatacacatccgatcattgatttgcattgccattgtgtttgcttcatttatttattgctgttgcttgtgcatctttaaatatggatcagaacagcactctccatgggccatatcctatatgcttccagcttgctgtaaatgtgctttaatttccaaatagcatatgcaagagtcaaagcaggctacccagtgttactacttatttttcctctcagatcttattaaatacggctgctgggagggtgaggcgtacgagttctcagtgggaactcctccaaatggattgcaagagaaatacaaaattgactctaaatctcttccattctcttctctatagggtgcaaaacgtccagctttaatgtatgagcatgcactttcatactagcaatcaaagcacagaaggacagagttaaattgtagacagccaatttgagctttgggcatctttgtgttgaacttgatgatacatttattcttttagtcaggacttccggcttttctgcaggaaggagttcggctgtatttttcaggtctgccgtatgatctgtgtgagcaagattcagcccacttgcccttccctttagtctttgttcttccctttccactgcgtcatcctcatcgttttcaatctcatcattgggtattgctgtatcaggtgtgcatttggcttcaaataatagaaaacccaacagtgaagaggtgaataagaaagctgggggcgggcactcagaactgtctctctaacgtcatcaaggacccacactcttctggtgttttttccaaccttccttaccctttgtcctttggcttattgcctcatagtcacaagatggtttctgaacggctgggtatcatgtctgccttctaagcaaaaagggaggaagaggcaggtgacaaggaatggtatccacatcaggacagcagagctttcccagagatgcttgtgtccactggctagaattctgtcacatggtgcccctagctgtctatgaatctgggaaggaagattttcagctaggtgtattactctctgaacgaaatttagattctcttaataaggaaggggaattggtctttgggaggggaatattgtctgctgtattggatgccatcattgtgtccctgccattgtctttcctgtcttctttactctctctcgtcgtacccctctgaacgctcttttaaccttatggccccccactccttctttcagatttgatatagaactcccaatcagaatctgtcatttcttagccctaataaaaatgttcattttggataaaaacctagctacaggcgggtgtctgtgaaacttctagttgctgtaagaaaatatactgatgtgttctctgggttaaaaaagtttaagtcagatcatgctaacgaatgatggagaatttgtttctgtaattggccccctccaaaacaatatcaaagggccacttcagggtggaaatagcagtcaataggagagaatgtaatctttgctcctataatagattgaagttcgtcctcgttcgcagcatgtaagcatcgagtaacagatcctgatattaatgttgttgttggggtttccatggaacatgtgcaagtgaagctggatattctcctggactttaaatcctaaaaagtcttaaagaccgcttcatgtagttcccctctcattcccacggggcctcccaaaagatattagtcatagcctggatttgtataatccaggacacccttttagctgaaacaaagagcttcagaagggaacacagaacagtgagcagctagccaaaggtcagtgaaaccacagaattgcctccgccgccagctgaggcaggggagagatgaggggacagtttactctgggccaaggtcaccgaggggagttgtgtccttctccccagggcttagcatagagatgtccgtgacatcacgggaaacagttgggagtattacttgacttaaataacctaaccttgttttccatcacgagttgaagctgtaaattgtcgtggggttcaggctctcctcaacagaaggccagggtcagacaggcaggttaaggtcaaggatgggggagtttgcagtggggattgccagagacaattgccttcctcccctggagccctaacagccatggggtccactcatccaccggcctgagacctcagacaaacttcctggggaacgtgctgctgagctttgtcagactttctcgtaaatgtacgtgggcagggatgcttgaaagtatttgctgtagccaaatgtagaagttcacgcattctacatgatgctctgatgagcaagacgagtagaactgggatgtggaggtgaaataaacatttctcagaagaatgtgttttcttttccaggctctagacatttgtagaactttctggattctttctgaatcagcttttgatgtaaataaacatagttacgtgatggaaaaagagttctgtaatgagacacatcaacctatttcttgctccccctctcaattactgtggaaatgtgttgtagaaggatgacaccaaataaagagtatcctgaaagtgacacgcaaatttcttgcaagtgtttttcagagcctcccctgggaatgcagatgtgccagtggcttttagggaaaggtaaatgtgctagaagcaaatcagtagtcagtgtctgctgttacttagaaccaggtgatctcacatttctgtattcagtgcttcccagaggcctgacaaaggagaagacatgttagtagatacgtttttggccctaagtcatcacagaaactggaaaattttgagcagtttgtttcacttaggtgagaactggttactttagattatcaacatgtgcaaattctgctcagtattcattatcagatgctgagctggaaaagatgagaaacccaaggaggagagctattgaattacataattggaatattatacctacatttaaattttgcgtgggcagggttttatcagactcagcttctaacctttgaaatgatttacatgagggggagcctgcatatctaacttgggcaacattaaccagactccgtcttcgccagtgtggtaataaccattgatttgccgtcctaggtgtgctgggaacgagcctacgtgtgacttttatgagatctgtttgcatttggtgttggaacgaccacatagcaatgtgggtttgttttttcaattgtaacactctgtgtaaacgttggcaccttattaaaaactaagtgtttgaa

SEQ ID NO: 31 - DNA, 3468 bp, Equus caballus
ggacacctgctgcctgcccccgcaccctgcccagtgcattccccaagcacctccggggaccctacctgtggcctccggagcccccttcccgcctcagccatgcctctaaaccgcactttgtccatgtcctcactgccaggactggacgattgggaggatgaattcgacctggagaatacagtgctcttcgaggtggcctgggaggtggccaacaaggtgggtggcatctacacggtgctacagacgaaggcgaaggtgacaggggatgaatggggcgacaactactacctggtgggaccatacacggagcaaggcgtgaggacccaggtggagctgctcgagcccccaaccccggccctgaagaggacgctggactccatgaacagcaagggctgcaaggtgtatttcgggcgctggctgatcgaggggggccccctggtggtgctcctggatgtgggggcctcagcctgggccctggaacgctggaagggagagctttgggacacctgcaacatcggggtgccctggtacgaccgtgaggccaacgacgccgtcctttttggcttcctcaccacctggttcctgggtgagttcctggcccagagcgaggagaagccacatgtggttgcacacttccacgagtggttggcgggcatcgggctctgcctgtgccgtgcccggcggctgcctgtggctacaatcttcaccacccacgccacgctgctggggcgatacctgtgtgccggtgctgtggacttctacaacaacctggagaatttcaacgtggacaaggaagctggtgagaggcaaatttatcaccgttactgcatggagcgggcggcagcccactgcactcacgtcttcactaccgtgtcccagatcaccgccattgaggctcagcacctactcaagaggaaaccagatatcgtgacccccaatggactgaatgtgaagaagttctctgccatgcatgagttccagaacctccatgctcagagcaaggcccgaatccaggagtttgtgcgtggccatttttatgggcacctggacttcaacttggataagaccctgtatttctttatcgccggccgctacgagttctccaacaagggggctgacgtcttcctggaggccttggcccggctcaactatctgctcagagtaaatggcagcgagcagacggtggtcgccttcttcatcatgccggctcggaccaacaacttcaacgtggaaaccctcaaggggcaagccgtgcgcaagcagctctgggatacggcgaacacagtgaaggagaagttcgggaggaagctttacgaatccctgctggttgggagcctcccggacatgaacaagatgctggacaaggaggatttcactatgatgaagagagccatctttgccacgcagcggcagtcttttccccctgtgtgcacccacaatatgctggacgactcctcggaccctatcctgaccaccatccgtcgaatcggcctcttcaatagtagtgctgacagggtcaaggtgattttccacccagagttcctctcctccacgagccccctgctccccgtggactatgaggagtttgtccgtggctgccaccttggggttttcccctcctactatgagccttggggctacacaccagctgagtgcacggttatgggcatccccagtatctccaccaacctctccggcttcggctgcttcatggaggaacacatcgcagacccctcagcttacggcatctacattctggaccggcggttccgcagcctggatgattcctgctcgcagcttacctccttcctctacagcttctgccagcagagccggcggcagcgcatcatccagcggaaccgcacggagcgcctctccgaccttctggactggaaatacctaggccggtactatatgtccgcgcgccacatggcgctggccaaggcctttccagaacatttcacctacgagccccgcgaggctgatgcgacccagggctaccgctacccacggcctgcatcggtgcctccgtcgccctcactgtcacgacactcgagcccgcaccagagcgaggacgaggaggagccccgggacgtgccgcccgatgaagacagtgagcgctacgacgaggacgaggaggccgccaaggaccggcgcaacatccgcgccccggagtggccgcgtcgcgcctcctgcacctcttccacgagcgggagcaagcgcggctcggtggacacggggccctccagctcgctcagcacccccagcgagcccctcagccccgccagctccctgggcgaggagcgcaactaagtctcctgccccacactccccgcccgcactgcctgcctcatccagagggtggatgctgaagggcgctgttcccaaaccctgctccaaatccggaaccctctgtggggtccacagccccgccccctccgccatacagtccagccccctctagctagctcttggaatccccacactccagaacccacaacgctgtgcctttcttgggttccagaatgcacaatctgtgccctggagtcccccaggcctggcccgggtcccagaggccaggactctgccgttaccctactgtggtgccagaggttttaggaaacctggcctattgccttccaggctcctagagccctttgtggtttgcaattctacagccctctgagcatgccatgttcaggcctggcctgggggccaccaagctccggaaaccgcgtggtatccctgctaatggggacaatcaagtccagaactaggcactttcagggactttactgaatgcagaagttcctccatttcaactccagaactcgggctgcaggccagggcactggtgtttactcggatccagccctccctgatttgtccagctctgcctgcaggatctctccatctctgcccccctcttcctccacactttggccaagcaaggagggggcagaaccacttggcttctcattcctactggagaacagacagtcttggtctagatgcctttctggccttttctggaccggatcctactccttccgtgcgtctgagctctcccttatatctccaggctccttctgtggcctccagggaacccctcggctgaggacagaactggctgtcttcccagccacaatccccaatcattagacccaccgtgaaaccactgggttctaggtgccggctgctgaatctagaaccttaagactgtgctgcatcctggtcccattcccctggtctaaaactgggcccactgggttctagaacctctatatttacctcgaggctcttccatccccaagctgtgccccgctcccagctttggtgaaacggaggggcccctcacgtgtgctgtgctgtgtctaatgcacttagtttgccgttgggaagggggagggcggaaggagtgtgactgaagtgtgtccagagatgaaaaaatacatctatatttaagaa

SEQ ID NO: 32 - DNA, 1426856 bp, Equus caballus
gagcttaacatttagtagaggagttaaacataaattaaaaccctgaatacagcattgaatatgttaagagctagaagagagatatagatgctgtattcatagaatccaaagagggaatctgctttgtgttggtggcaagagaggcattcctagtagtggtgtcatttcagtggggttttagtagctatgggtttggagatgctgaattggcaactggacctcccaggaagagtaaagaagcagaggaagaggatatatagagataaatgtattactaggtttcatttatctagcagatatttgttaagtgcctactccctggtaggcactattctgggaacctggaatacatcagtataaaagatcattgccctcatgtagcggggagatggataataatcatactaagctggttaattaaatagtatgttagtgggtgataagcactttgggtagaaataaaacagggtaagtgggtttgggagggctgtgcaggttgggatgtgtgttagtttgctaaagctgccataataaaataccacagatttggtgacttagcaacaaaaatttattttctcacacttctggaggctggaagttcaaaatcaaggtgtgggcaggcttggtttctcccaagccctagctccttggctttcagatggccaccttctcactgtgtcctcacatggtctttgctctgtgaggacatgcctctgatatcttcctatgtgtccaaaaacttgttcttataaggaccccagtcagattagattagggcccactctaatggcctcatttaactggatcatcttttttaagatcttatctacaaatgtagtcacattcagaggtactgggggttaggacttcaacacataaattttaggggtacacaatcagcccatagcagagtggttacaatttaaagaaagtggtgagagtagactctgagagaaagacattagatcaaaatcttgaaacaagaattacgtggggaaatagataaggacacagattcggggcagacagactagccagtgtaaaggccccatggcaggcttgtgttcagtgtgttcaagaaacagaaagcaggctagttagcttgagcagagcaaaaccaaagagagtaattggagtaattggggataaaggcagagaaacaaagggaaccagaatacataagactttataggccatggtgaagactgagcatttgctctgagtggagctgagagaccctgcagggttctgagcaggagttcaattcaatcatgctaatcactggctgctcttttgaaatgtaccacggagcaggagtaggcaaactagagcccaggggccaaatgcagccagttgcctctttttgtatggtccattaactaagaattgtttctacattgttaagtgatttaaaaaacatcaaaagaagaataatatttcatgacacaggaaaattatatgaaattcaaatttagtatccaaaaataaagttttagtggaactctgctcattcatttacatattacctatggctgcttttgcattacagtgacagagttgagtatttgtaagggagactgcttggcctgcaaagcatgcaatgtttaacatttgacttttccagagtaagttctctgacccctactaagcagggtcaatgatagaagcaggtgggaagaatggtgtctctgaccaagaatatagtggtggaggccatagtgggagttggacagcattggtggtgaaacggtgtttgcataaaatgattggaaatggggattggggaggggttgtggggtttgcatgctttgcagtgaaacaggatgtcccgcaggcctttgaacagagctaggtcagccccataccagtgttttaggaagcttgattggcagcagatggctacaggggactgactgcaatggtaaagtcaagaggtactgatggcctggaaatgaggagataaggacaatacaaaggttgattcaagagcaccctgaacacattgagcagcttttccattttctgtgccagtgaggaaccttctgtgataatatagcagttttcaaacaactttaaaaatatctcgaagtgctagaagactagtattctaattatataccctttgagttaaaatagagttcttcaagtgaatcaggccagatgtcttttacaatttaggcctctgaatgtataatattgaaaatatgaactcaaaagaagaccatcagtgatccctaaatggcctgaggaactccgaatctggatttccaatttatttaattagcatttattgcttaaaggcaaaaatcgttaacttgacatttttgtttttttctatgagctactttcataatctaacaacccccacccttggttttaaagtacttctttagatatccattatctttgctaagatatttgagtcatgttttttccaatatgtattttggaagattgatgagtaagaagacatttaattcaattttatgtgttccttaaatcatctcaatcatatattttatagggattttgcttcttccttaaaagtaagcctttattattataaagtatgatttaaatattaattatataatcttagctgatatatttaaagaagtactctgtatttcacatattacatccaaagttttacaagtttgcttcataacatacattttccaactttattgagtcctgtctttccaaatgcaagtgatgataagtaaggctaaaatgcaaaatactccaaatataggaagaagagtgggctagaattttataaatcttctttatgaaagagttacatagcataaaatagacctcaaacccagagtttattcatatatgaaggagtacaacattccttgagtgaatatatttctgttgatggactctttcagatatagctatcttctgtctgaatttggactagttaaaagaagtatgaaatatctctgttggaatgaggaaagtaggatctcctattcttctaaaaataatctttctttaccaagatgggagtggtggttaagtatcctcactaggatttccaagggaagagttatttccagacacgatttgaggaagaacttttctaaggtatgatttaactttggaaatgtcactcttaagtttctattcaggtaattcaattagaaagatgataaaattaatttcatattttctgggttttctttgttaaaaggagggtccttattatgtctccaaagttccccaactctgagaagtaaaagacaacggtgtcacaaacgttgataataaaaagaactgaagaagacagtgagctccagagtctagaagtgggaggcagtgactcttcaatccattcccttcgtttattttgcagaggaacctgaggcctcaggaggccaagttcattcagtgctatgatgcctggcataattgtctcattatatctttgttgttgggccagatttacccaacagttttgttcagttagaaccctgttcttgggctaagaatgcttttctttctctgctagagtctagactacaagtcttccaagtgcatgatgcttacattggtagaagtaagctgattttacatgacgctcaaacttggcataaaagagcagttgaatcacataataatgaaggagtcccttttatgttttccttcagtcttttgacagcatcagtggacaacctcgagttactgcaaatatatttttattaccactcaaagacctgtgactctccatctttaacaagagagcagatctgaggctcagtcttcaacaaggcaagaggataaatctaaattttgagatgtatctatattttatttagaagtattttttatgaacttcttccatttatggcaaaataataattttctttttatgaaaactgatttattttagaaacctcaatccagttacgataaaatttgtgaaggagtgtgaggtggaacatagatactgcacaaccatgaatggggccacatgtggctgaactttggggacacttctctaggcaccacctaggttggcatgtctggagatgcaagtggtaccatatagggtgaaaacccccagaataagagcaagaagacaagctctagttcttgatttgttgggtaaggatgctcattctaagcttcatttctcaaaagtacaataaaggaaattactgttggaaacagctaagtgtactccagctctgtgttctcagataacttgcaaaggtggtagcaccactgtcttcaagatgtaatatccaaaacaattaaggaacattacccactcatcataaccattaggggctaaattgcactaataatcaccaaacactattacctcttcaaaaatacttttacccagaagtatgcagatcaatttaatcctcatgaaaacttatttgaatcatacatagagaaaacccacacccgtgttccaggagaacaagtagaaaagtgcacaggtgtgcacacacacacacacacacacacacacacatacaataaatcttgcctgatctgtgaattcccatgtctatcagggccaagtttctggttattaccataagaaaggatttagaagaggatctaactcaataaatatagcaaaaagctgtgagtatgactttaactctgctgacaagtcattaatattctccattctaaatccaatttgttgttagaatttaatgctaaagtatttaaaagattgagtctgctgataggacacagttttatcttcatttctgttttcaaacactccttgcaaggcacaagaatatgtgctaatgtctgagtcttaaaatgagttgggattttcaaaaccatgtataaaagtatgtgtacaataatttttcagttaacttccaggtaaactttaaatagttcttcagtaacattgactataactgaggcaagtagaaatgatgaaccaagtaatgattagctagtgtttaatgcttatgctgcaatcagctgtttaaaaagaaaaccatttaaagttagttatttattggaataacataggagtgtagttcattacccattttcattagtcttcaatatgctcggtacattagtattataccaattgctaactcaagattagaatagtagttttacacataagttgaataacacttctcttccacttgttttcatatttattttttaaattttgctggacgtatatgttaaatttttagtatgtagaatttggaataaggtctaataatattatatttaatagagagttctcttttgtttgatcttccatttctaaataaaattttccttcttattgttataatctatttgaattaactttctgtccttgtcattaagcattgtattttatttatattttgatattaaaaatcctgtaattattataatctattcaagattaagctagtgtcagaatgaagttggcatatcttgatcaactaagagaaccaagacgatgtaaagaaaacagtgtgaaataacatacactttagtcattttgagtacacactcttaataattgtagccataagtgggtaatttacactctctgatttcttatttcatagagtagttatatttgtgaaaaacacttcataacttgagagatgctatgtaaatgctactggcctccaatgatctttacccgctggtgttcacgccctcatgtagtcccctcccactttgtaccagagcagagttgatctgtgtgaccgttagaacacggcagacatgatgatatgtcacttccaaggttaggttgtaaaagattcggtagttttcattgtggtcattctcagtctctattggatccctctggggaagccaggaaccatgtgatgaggtcagtctatagaaaaacctacatgtgagaaagtgaggcctcttgtcaatagccatgtgagtgcagcatcttggaagctgatcttccagccctgtgaaaccttcagatgcctgcagccctggcctatgtcttgactacaacctcatgaaagaccctggaccagaaccacccagctaaaccacatccaaagttctgacccaccagaaactttaagataaatttttcaatttactgtttagtttattggtttaatgcactaaatttgagggtaatttgttacacagcaatagatcactaggatattgttgttatccccaaagtcacctactccttcttctatttcctataaggactttatgatgctttcatgatatctgaactagacagaagtggattgcaaagacaaacatatctaccaataaatatatgctaggctgataaaaaacaaaacacatatttaatatacattcacgtcttttttccccaagggttaaataaattatgatcaggagtcattacctcaattaaaatccccaaaaactctaggaatgggtgttatcccccttctcaaaggaggaaacaagaattggtagagattaacgaatgatccctggcaatgtgttacacagctagcatcttacagcagatctgtcataaccctgctttgtatgctaagtaagcaagcaccaatcaggctctaagagaaagtctatgaagtacacagctttactgcaggggccttggtacatccaggagaatttgtttcatttacttcaagcttcaggactgggctgcaggggcatatgtttgcgtgaagtgtgatctttgagtgagaggggcattgctagggtataattcagttttgtgggtatctaaccttcttcttgggaatcattggacatttgaaatgaatgcttattcttgcaagccattacaagttttttgccaccctccaacatgtacatcgtagcatagatttcaggctggttctgtggtatagagctcaaacatcgtaacacccctgcttctgagtaacgttagcagaaagcgatccataaatcatatagatccattaatagcaagagaaaaatgatgaagtatagccaagagaaaagctggattctgctgacagttgaaatgcgatgaagattctgtgaagcagagataaagtaggaaggatgtccatgtagaaaacaactctaaatgtgccagtggtgggaattttctccaaatttactcagcttccattgtaattctaaagtcgatccaaatcattttgtgacaaaaatcatattgagcacccacgcagaagaaggattcctcccaaaacaggctattgacttcttaaaaattggcatggtatcaatcatggtagttcagaatcttctagatccctctaagaatttcttaaatgtggctagctccatttcaagaatatttgtttgctttcatggccaaccattcttgttagattttgggaattcaataagctctgagtgatcataattcaatattttagtgacacatttttaggtttctaaatcagttttatgaggcatgggataaaaataaaatcaaagtctggtgaacacttatggtgctcagtcaagtctgaatatgacctgtaagaaacagagtagaaacaaaatgacgctgagtaacccatttttattacaagaaaaaaagtgattaaactagtggaaatataacaagctactaaaattttttaaaagttttaattcataagattctgtctacttatcactttatcagatggggttgagatgaaaaatttaagttaaatatgtttgattttattctccaaatttaagggaaatgttatatgttcagcattaaaaactacgtttgctgtgttgcattctcattcccttttagatgtgtgctttgttaaacttggtagcagatcctaagtgaggataatttatctttctaccaatgaagaaaattggaatcttatcggttatgcatattttatacagaaaactaacagatatttcagcatagacaaatactgttatggacaattagaagacttgtgtttaagaattatttaaaatcagactgtcctgaaaagttcaatatcttctaaagtaaagttataatttttacaatgactaatagctcatacattttactttgaaaatctccatctttccccaaatagatcctttttctataacatagtacaaaaagggggcaagagatttcaccccaaatgctttttaaccttgtggtttatgctcatgaaaagtttcatgtttggcaaaatagtagtgctaagattatggtaatagcatcaagtaaagtgatataaatacgtatgaaaattgacctgtctgagccttggtttcttcctcagtgaatagcataatggacatagggacagtggacccgatgcctaaattcaaaacctggttttgcaaaccagtacctatttaactttggaatttaatctctgtatggctcagtttcttcatctgtaaaatggagacggtaatgacctttatctcatcgttctattatgagaattaaatgaataatatagaaaacgcttcaagccatgcttgccttatagtgagagctatatgagttaaggggttaatgttgagatgatgacataaaaaaatgtttgggaagtctgacatgatgcaagtgtgtgtgtgtgtatgtatagagagagagagagagaaatatatatgtgtatatatgaaaaaattataaagttcattagatgtaggcttgacattacctcccaagtcaaaccagattagcagaccttataaacctcccctccacgatcagatcactgtattagtcagagaaacacattcttcttcagctgttagagatgagtcgactgaggcggattcctcagaaaaggttaatgttatttaggccatgcttctgcttaatattttagaactagcactgcttagcttgaaatatcttctttagttgcattgtcttttgatgaattttagatgtgttttgacaaaatgactatgtaaaccacatggcctttcacaaataggttgtttatgattatattttcccaggcccattcttctatgctcgtatggaaacagtagaacatacattgacttctgtctgaagtggttcactgtggtcatcatactgttgattatcggctttataagttagaagaatatgtagaaatagatatagatagatagcacatactcaatgtgtttgtttatttataaattatatgcatcactatgccactaaaatattgtgcatattataagacatacaaaaattaaaatgtaaaatattgaggtagatataaaataaatattaaatatttttgttaattagcgaaactcaaacctttttgctcttattaaaatgttagaatactatatatttatgatgttatttcttctatataataatagcagaatatttataactttagtgacaacaatataattataccttcttagttatttttgaaagtcttaattttagtttggttaggtttttttctatacttcagttctaaacttagttctaagttcagcatattttatatttgcttttttttcttttgagcaagattagccctaactgttgccaatcctcctcttttgctgaggaagactggccctgcactaacatccatgcccatcttcctctactttatatgtgggacgcccaccacagcatggcgtgccaagtggtgccatgtccacacctgggatctgaaccggtcaaccccaggccaccgaagtgaaacgtgcgcacttaactgctgcgccactgggccggcccctatatttgcttttaatggttgaaaaagttaccagatacatttgtacatcaaaatggaagaagcatatcatacctcccgcttattgaatcataatatgtattgttccctttcatcagtgcctcaatatagcagttattaaaagcccacataatacatttagggtgaagttaacttttaagatacacaatataactctgatatccgatagcatcttgataatttcacggtataaggggcccactcacacctgatctgaatatatcattgcttcctttatctgccatctgactgaaacagaggtctcctcaagaagcagaggaggcacctctgcctattgtcctgggtgtttattacgagtgctggttgcagtccagcttttctttttatgaatcatttatttctgttgtctcttgtgaaagtgagctggagtgaaataatgctaaatagtgtgatctataaatctacttaaccaggcacacacaaactagaagacactgcagtatattgagtgtgcgctgctgtgtgatggcgcctcactgcacagcctgtgccagtatagaactttctctccttccatcaggtatgctgtgctttagtgatgtacgatcaaggcacatgttaagagttagtgcaactaaagtctctcttaaaaagatatagaagcattattcataatattttataatattttcttcccacaccttgtcccacacacactgtggagaccaccaatttatgcagtaaagaagtggtaattgttgtctcatctttttgtggaacaagagttatctgagctgtgcacacaggcaatcatcatggatttgaaattttaatacaaaaacataaaatcgtgtctgggcacattgttatcaagtggaatcatgctgcactctgtgcaaactcctatcatagcactgttgtgatattctatccctgactctgtctccagcatcctctctcacacaccccaacctcaagattatgagcgcagtaaagttagtgactacatcatttatgtactgtctgcaatcctagaagaagcatatagtagattttcgatagtttttgaattaatgaacacatgaattcaagaatagagatggtttgagctgcagagaaatatatactatccccagagacaaatgtgaaaaggagaactgggaagctaaagtgaggtgagcaggaattttattaaggccttgcgaggaaaagtaaagagaggcaaaaatcctattgtgtagctctctttcctcccccctttttcaccactactagctgaagtatatcctttagaaagacctgaaggaatactagaggagtttccattatcgctttttatctaagagacagctttggcattttcacttaacatctatagaactgctctaagtaagtaccatgtgaaacacagagattagtagtgttaatttaatgcagtaagcttagagtctttataagatactatctccttttgaactttatgttcaaatcagtagagaccagagcaaggtttttctgaagaatattaacttcgctgcttcatatgttaagcaaataaaagagccagagaaaatacaaatactttgggctctaacatcggcataaatcacactgatatatgggaaagcaggcctttttatttttgttttctcataaactgctggggaaattggatgaacttgctctatggataatggacacagtaatgttgagagaagatctgttgcaatgatgcatttggaaaggctctaatcaggtaaagatccagctcaattgatgacacaaaacaaacacaaaagttgttacggacaaagtaccatatattttatcatcaagctgttcccctgaatcagagagaggcagtgttacctcagtaagtgcattatgctctcatcttaaaaaagtaacaaagctgagacattccaattttatttttatgcattcccttttaagggtaatctcttattttggcaccaataaaatgtttgaaaagaatgaaatttccttctataggttgtagcaacagcagtgtaggtacactgagagaaatgcttggagcaagatggctgccaaagaaaataaagaggcttcagttgatgattgttttcacgttaataaatctgtctttaactacataaattttaataaatttatcttctatctatgttttactacagctgatattaaaattagtgtttatccttctcaatccacaataattgaaaatgaccaaaaaaatcaaaagggctccatgtatggtcaggggaagaaggaagacttcaagggatattgcagttggcggcagctgagcctgcaactgggaaatacccctggataacggagaatcttctgcctccagcatggtttggagtccccgcacaagttttgctaactctctaatatgcctttatgatttacctcttgcccattgcaaacagtgccacataatgctcctaaaagaaattccactgtatgaaagcccatctggctaaatgcctacttgaggtctcctgttgacttcgttttgaatttccatatctgcaattcttcttagagccacaacttatgtttttggcattcctttcgataagcttctacatcaaatgcgtgtacgtttatttaaaacatggggtcacgggggcgatgacgaaaaaggagtagtggccatttctcagcttttcttgacttctttcccagtttgcagttgcacttaagagttaggtccgtaactgtgtaccacttgctacaatgttttcagtcccacacgtttcatctgtaaacttccgttcctgtgtttgacagctcctctgccccctctccctatctcttgaggaggaaggagagttgacaagaacaaatcttcctccattttacccacagagactctggacatgggagaggtctacagaagcttataaagttttcacttaccatccctttcctggactttgggggtatgctggctaatcagaggaccagtagtaaatcttaaagagagcgatgttttcttttgaaaaataacagcatcagtgactgagtgaggacccactatgtgtaaggctccgtgctggtactttctatatgctattttattgaatcttcaacaaaaaattatatatggtaccccttaatagcaaggccaggctatagatgaagaaattaagcatcagtgagtttaagtcaggacctttctagatctgaaagtccaagtcatgtccattttttttcaggctcttggaatactaaaacttaaataaccaaatatggtcacaaaaatcattgtgataatttttaaattatatatgtaacaaaatacaagttttaacacaaaagcaatgtaataaagttgtccaatacccaaaatcttcacattaatgtgtattttaaaaattaatgcatagtatgtgatagatgcatggttagataaaggaacaggacttacatttatatcatgaatgtcactctttagtctcttgtgtgtatctctgggaagcaattgagacacagagggttaagcaagctgcccatagccacgcagctaagaaataacaagctaaaagatgaactgacatgtctgaccctagagtgtgtgcttttaaatgactctgctaggctgtttccctaggtaggcccacatccaaacgttttttactcaccataagccatttcaagttttcaaatagtaagaagatgagtagagttatttatttggcttaaatatattatgggaataaatactttcttggtttcccaccgtctttatccctgcttaagtactaggttatgaagagtctccctttcacttatctctatttttttactgacaggtagacctactgaagagcattgggaaggtagtggaaacaggactaatgcacagaactatagtgcagtttggaagcactggcaatcgatatgaacacagaagacctggactgagtcccaggtctgatgttctgtgccttggatttcttacctacaaaatagtggtgtagagcgaatgagatttcagaagctatctaagtgtgtccaacacagggaatttggtatattagaggtcagcttttctggaatgaatttggtcagaggaggtcccaaagtgtgtacagaagtccctgatgggaagttagtggcttctaaaggaggtttcagaaattaagcagtgttatactcaactcaaagctatgaggccttagtccaagcaaggtaacgatcataggttcaagacctatatagctcaattagcaacacccagaagctggttataaaaccaatcccatgtcattataggcatgcagacagcaggtaaaatatcctttatttaatcccagctggcctctgaacagacagggggcgtctgtcatcacaatgctcccaaacacttacacccccttttccctcaaacccccattgggggtcagcttttcatagtcaggagactatcatcaaaactcaatctacacactttgcaaaaggagttttcaaaaaacaaggaggcagtcaccttgatatgcattttaatgtcatccatgtatatatactttcttttgtcaaaaggatggagagtgaaagtaacttagaaaccagggctgacaagggctacatcagcagtttaaaaactaatttaagattattttataagtctttttgagtagaatttctttctcttttttcctggtacttttaaaatagccctcactctggggtcttaactttctcccacttgcctgccccaaataagactgttctgaaacagtttctgggtaaatagatattataggaatatttttaaaaatagcctatatctcctttttttatgtcatttaaattatcagtgtaaaatatatcaactttgtatttgattttcttttttgagtagccgttggaccaaagttttagagctaccatttaagtttcctaccggaaaaaagaaaatactggaggatgtctaacctttgtcctattcatcctgatttcttccagatgtgagaaacacttatctgtgctgtaccagcctgaatcttttccttggttaacgttttagttcttctgttcgttctgtgtatggcatctgtggtttttaagactgagtatgtataactgaaaagctgttccgatcatttttatatagaaacaattactttagaccacaaaccaaaattacatgaagataatgctatgtaggaggcctaagtagaaagaaatagggtcctaattaatgctacttttgtgctattatcattaatctgggtgggttacataatgctacatttataatgggagacaagtgcccaaagctgtttagcaaatcattttgtaggcacatgttatggtatgccatctttcaggccagtgggcaacttttatttcattctttggtgctggtgggtctggaagaatatctgttgtggcttgtgatgagagaaatgtcttcagatagtaaaccatataactttggaaaatttttatggacagaaataaaaaataaaaaatcactgtgtggaaataaagagaagctgtattttccattactggaaaaggttttaacaaaaataaaacaaatgtcaacatctctgcaagctccacaggcctgcgaagtcacaaatatctcaggacattcccaatgctgccttctgtttctataaacttcaagatgaaggtgacagggtgtttaaaataccagaaacagttgcactccagctaatattcattggtccaagtggtgagagaaagccctcacacacttctgaaaagaagctttagactcagccctcttttcgaagtgcctgcagacgacttgggttgtatttcatcaccctccccaggaactaagaattctcctttgcagctagaaacttgtcctcactcacttcagacctaagacattcttttctcctggagaaataaaggcttttagtgatttcttacaccaaaagtatttggtattttttcctttgccttttggcgctggtttaaggttgttacagataagctattttattttttattttgtttcttgcctctcaacatttcaggctgtcagttggaaaatcaagggtaagaagaatctactcagtgtgatgtactagaaggagggagggggttggagtcaggagaagagtttctgtctggaatcttctatgttgtggctatattaggaactttgagtcaatttggttagtcattctgagccacagggtcctcataggaaagacagatttaataaccatgatctcacagaattgagttacaatgcaaatgagagcgtgagaatgctacacaaatgagataataagtatcactgttatgttttcatctctacaaccactactggaaaacggaactaagtttcaagaatagaccttcaggggccggccctatggctgagatgttaagttcacatgctctgctctggcggtccagggtttcactggttcatatcccgggcactgacctagcactgctcatcaagccatgctgaggcggcgtcccacatagcagaatcagaaggacttaaacgtagaatgtactactatgtactggggggctttgaggagaagaagaacaagaaaaaaaaagattggcaacagatattagctcagggccaatctttaaaaaaacaaaaagaaaaggagaggaagccctcgtctttataaaaataaaataaaataaactttctatggacctctggttagggagcgctttaacacgttagaagcaataacacattggaccaagaacaccaagcccaatgagccagttctgatctccacatccaagttgacaatgctctctttccctttccttctgctgagttttttgtttttatttatttattttttaatgcaagaactagggcatgccagtccactattacagttcccccgagctacactactctaagcttttccagctgtcctctgtgactactcatgatcccacatcttcagggaaaattcgaaaagatgtgtgggtagatcaatagaaagttaagtatgttctatattctgcttgctttgaaatgctcctaaatgtagaaattactttagttgggaagtaaggagttatatcatagagtccaaaatatacagaaaaatcataaaatagttaatttaaccaaagtttatcgaatgtttcttacgtgcaaggcactgaagtaggtaatttaagaggaataacatatctatccctccctctataccttacagtctagataagggaagtctatatttgtatataagaaggatatgtgcaggcactatatttggtatgatttgggggatataggagatgatgaggatatttcttagtgaaaaatcctagggcttttaataagggaaatttttgagctgagccttataagatgagtgaggtattgacagattgagctacaggagtgctagttgagggactagcctgagaaaaatgttggtggcagaaaaggacagatagaataaacaaatgatgattggactggagttagagtggagagcatatatagggtgaaagagaaaggaaatgaactctccctggtgcctttaaggagactaccctcatcaattacttaatctaattccatcttttatcagtcaatcatgtgttatcactactttacaaataaagaaaccagagcccaaggagattaattaacctatctgaaaacaaagagctagcaagtgacatttaggatttgaaaccaggttttcttctgttgcagtaatcatactctttctatcatggagtcccaacgatagcaataatgaataattttgatttattggtacctactgtatgccacagttttcattttctttaatcctcagaagtagctaaaatgtagcaattattatccagatatccagatgaagaaactagctcagaaaatttattgatgtataaaaataatggaagttaaggctgagaagcagaaatgggataggttttattactaggcaaaagagtctttgttttttttttaaaattttttggtgaggaagatttgctctgagctaacttctgttgccaatcttccttttttatttttttttcttgaggaagattgtcgctgagctaacatctgtgccaatcttcctctgttttgtatgtggcatgcctccacagcaagctgattagtggagtgggtctgcatccaggatctgaacccgccaaccttggctccctgagtggaacgcacagaactttaaccacttggccatggggatggccccaggagtctttattttaaataaaaactaataaggtaaccattaaatgtattagtccaaaaaatgcatgatgagaatcaaacttgaagaagattcatctcttagctctgtaaggaccaaatgaagagatggaagatccctggtaagattttaagaagggattaatattcaaaatacaaagaactctttaaaactcaaagaactcttaaaactcaacaacaagaaaacaacttgattaaaaaacgggccaaagaccataacaggcacctcaccaaagaagatgtacagatggcaaataagcctatgaaaagatactcatgttatatgtcatcaaggaaaagcaaattaaaacaacaatgagataccagtacacagccattagaaaatccaaagtagaacactgacaacaacaagtgctgatgagaatgcggaacaacaaaaactctcattcactgacagtgagaatggaaaatggtgcagcaactttgcaagacaatttggcagtttcttgcaaaactaaacatgctcttaccatacaattcagcacttgtgctccttgggatttacccaaaggaattaaaacttatgtccacacaaaaaccttatttcagacttatttattatttatatctatgtgatataaacatgtccacactgatgtttttagcagctttgtttttaaataccaaaacttggaagcaaccaagatgtccttcagtaggtgaagggataaataaactgcagtacatccaaacagtggaatcttattcaatgctgagaagaaatgagctatcaagccttgaaaagacatggaggaaacttaaatgcatattactaagtgaaagaagccaatctgaaaaggctaagtactgtgtgattccaattatatgacattctggaaaaggcacaactctgaagacattaaaacgataagtggttgccagggttttgagggaggggagggataaaataggcagagcacagaggattttttaaggacagtgaaaatactctgtatgataccataatgatggatgcatatctttatgcgtttgtccaagcccatagagggtacaacgccaagagtgaactggaatgtaaactatggcctttaggtgattatatgtcaatgggggttcatcagttctaataagtgtaccactctggtggggaaggctgataaagcagaaggctatgcatgtgttggggcaaggaggtatatgcgaaatctctactttcccttcagttttgctgtgaacctaaaactgctctaaaaaaataaagttttaattttaaagaatagaattaagaaaatgatgattgaaagtgtttggaaccaaatttcagccagaatttaggtcttaaatgtatttttaaaagttatttttaagtttaagagatctaaattaaaatgtaacctagtcttgtattcttatcttctatcgcacatggtttgacaatgagatcatctagtaaactaaatacatgcactaaaatgccaagcatacacagattaactgtttttaaagaaaatttagtgccgtatttcctccatgaccagtttttgagtgccaattgcatgcaaattactcctctgagtataaagcatgataagagacctgagcacccgaggatgtaaggtctttgcattcccaggagtttgacctgtgatacccatttctttatttcaagcatatagtaggctctcaataaaagtgttggttgaataaatcagtgagtgaagggatcagtcgatcgctgactttagtgattatcgtttgctgaatagccatgttctgttctcagtggtgtagtcagctcatggagatgaggtatcatcataccttggaacataagtatgccattatccttcctattcatgggaattatattttagacaactccattttatatttccttagttaccaaagcaattaaatgcattcataaaggacccaatggtggatttttttaactatattttttatctataacaaatgttataatgagcttctagtgtaccatacagatgaaatgttcaagcttcaagggatcttaaatttgacttaacattaagtctgcagtatttttaaactattttaagaagtaaatggccgtacatgtcagtagtccaggctaaaatgtctagctcattaatttccttttttacttccattcatattaaaatatcatatccaaaacattttttataatatcttagttactttttttccctgagaaggaagagtttaggtagttttattccatttcttatatccactcttcattataccaaactacccaattgattacaaagcagctggacctaaattttctcaaatagattttcaggtgatatttgcgaggctaatctaataatcaatggactactttgtgaagtgcatatgaattatgtatattatttcaagagactttgaactgacctatttactaattcagttttgtcagtaggatacatttgcaaactgagtgttgcagttctaccgcattaccaacctcttattggagaacacttacagaattgttaaaggcctaaagctgaggagaaagtttagagcaactctgtcatttctcaagagagacggaggtcatgggagaatacagtgaggggatttaggcctcttacctgaaatctaatgttcatgatactgctgcacaccccaaccctgccaagaccagagaatattgtattaaagaatatgtgttatgtgatgctctctttgtacactagagctgtattatgtcttctggtacataatatagcacagatcacattacttaagagaaagtggtgtgttcttcaagttaaataagcaacttacctcccacagaggtaaaatgacattgtgtttaatgagatctttaaatatttgcttctggaaagtttatttggttgttataagattttccttgttttcgatatttatctgtatgtttatgtatcttaagtcatattatgtttaaagatatttgatgctaggttagtaagactatgctatagattcatcagacatcaaattatggccatggcaaaagtttccaaaggatctcagtagatttcacaggcttgttcccaaaagctcatatgttgacttacagaaagtacctctttgagagtttagttattctcatgttacaaataggtccaaaaggtatgcttctctacttttggcactatagactagaagacaaattgtagactaaaagaaacattaataatactaattttgtacaataatgacaatcgtaattatcaaaaaatgagtactttcatgagtcaagcactgtcccaggtgtatctctaatcctcacgtcaactctgccacctgagagttgcatcttgattctagtgatgaggacatgaggagtcaatgtgttttgcgttacctgaagtcagtcacaaagcgtagaatgtggaaaggaactcagtctgacaccatacctgtagatctgttatcacaacaaagtatgcaccagaaaataataaaccaacagagtaataacctaaggctcaggagcagtcttaatattctttaatttaaaagaaaagataaaaatattgtaacagaactaaaaggcaaatgatgacagagcaggattggaaagactcaatagtactttctgtcattgctatatgactgctctgtgtgattcatattcatctactattattcatattattgttcataatactagctcgcatttattgagttggttcagggaaggcttcctgaaggaagagaaacagtaagggtgacctgaacaattaattagccgatcgaaagagcttgggagacaagcagacaacggtgcggggagtattctaagtgtggagaacagcttgtgcaaaggctcagatgtaagagactgttatgcattaaattgtgtcctcccaaagttcatatgttgaggtcctaacccccactacctcagaatgtgaccttatttggaaatgcagttgttgtggtataattagttaagatgaggtcatactagggtagggtgggcccctaatctaatattactggtgtccttataaaaaggggaacattggacacagacacacacagggagaatgccatgtgaagatgaaggcagagatagagtgatgtatctacaaggcaaagaacacgaaagactgccagctacctaccagaaggtaggggagaagcatgtgatggattcttcctcacagccctcagaaggaatcaaccctgctgatgccttgatcttggacttctagcctccagaactgtgaaactataaatttctgtttttctgttgttcaagccactccattgattatggtaaccctggcaacctcatacagagactaaggagtgcaaagacatgcagtttggctcataactctcagtcgttaataaaaggcaaactgtcctctaacaactagagatcgcagagaaacgcccaagacattttagagctcttccattcataattatcagtatattaaagaatacattgtggggctaaaagttatgcaccatgatctgttaaaattacttaataacaaacaattgatttcactgtgttatacagtattcaataaacaagtatgtagcatctatgatgttccatgttctgtagggtagcggtcaaaagcttggactgtcaacagaactaagagtagagacttcacattttaggatgtagattttgggaaatattctgactccttgggatgttaatgtccttatcaacttcctcagggagagggtattaaataagattacaggggtaacatgtttagtggattgcatgttggatagcaaggataccttaaaggagctctgttattattattgttattattattttgttatttatgttagggtggggagatgttcagtttgtcatgccatccctttaggcttctggtctctccctgcctgtgagatgtgttggcagtttctgggtctgttccctggttcctcatttctggcttttgatggggcatgatggtcagatggccatgattagttctttggcttgcattgcagattatctattaagtagacatctcctcagccactgaggcatatggtcagcacttcctgggcttaaaataaatctgcattttaacatgtgggattttattatgcaaaagagagctcacacggggtctaatcttgtgatttgttatgctgcacacgtctgcttttgcattctggatggaatagtacattaggccccgggcctcccatcttatggcattgcatagatagtctgagtgaggacatcctagggaggaacatgagctctgaactgtgtcaggtgcaggaaaggagagaagggtgaggagtaactttcccttcctccttttgcagaccagtcattcagattttttaatcaaccataaatttagcacctactacgcaccagctgtttctgtttccccaggtacttaggtgatggtgaacaagatggcacacccatggatgcaaggtgtttttttagaagagatcaccccttactctgggctgatgcagctctgttcctggacactcaccattgccagtggagggttgaatgggtttcagattgcaccctcttgactaagtcctgttggactagtcacagcattaaggcacttaaattgacagttactgaagagaatgctcagcagataaacaagacgactaactatgtaatgctctgagggctccttggttttgagggggggcatctgtatactggagaaatttattctgtatcccttaatcacaaattgtttcttatgtgaatgggcaaaaagtaatggtttatctaacatttggttgagcaaatacttcaggttttacatattaaaagtagctattttttattctaaaaattttccaagcattactattctaatatataaaaggaaaagattaatggcaaataagatatttatttgtagaaattagctcgagtattttcctatattaataaaaacatttttaagtctctgaaatgaggatttttaattttttcatgtgtggcatgccatctaagttaataaatactgcaaaagataaaaataacagcacagagcacaaaaattcaggctctggagactgagagaattagatttggattctacttccagttccccctcctgcttgttttgttatcatggacaagtcactaatccttcatccattgggctcatgataatgctgctttctttgagtgttatgaggattaaaggagataatgcaagtgaagtgttaggcacagcctgagcacctggtaaatattcaataagtggtagcttttagttgatgctgctggtactttttaaaattcataaggatctgcaacatgtaaactagcattacacacatcaggacaatagattttgcaattatctacgtagaaatagatgtgtttataaacccactattatatatatgcacaagtgagagcacatttacttctatgacattaataatgttggctaacacatatgtaaccatgctaagccctgtcctatgtgcttcatattaaataactcagcatccttgtaataatcctctgggtagattctgttataaccattctgcagatgagaaaactgaggccttaaaatgagaacatgcctctagtaagctgtggaggtggaatttcaacctagaaaatctgctccagctctgtgttcttaacaacgattatactgttattcaatgaatttcaatgataaacaagttaatatatatataacacacatatttcaatgacaaacaagttaatgtatatatgcacacacataaacattgcagtacacaaatgtgtgtgagtatatttgccctaaaaaagctaatgcacgatgactttgtagaatatctcctcctctattattctcttgaggtctatagccacacttagacttttctgtttgtggttccctttttcctagcaggatgattgaattatatggcacatcatatgcaaaatgagacactaaattgaaacctttctctgttgcccagcaatggatcattgctccacattgcttgaatttatgcttaagcatatccttaggcattattctccttgtttgtttcctctcacccccactcaagttacttgtacagtggctttatatccaattatgtatcatggagtggcagaaggattgcattaatatggattaactgtgttccacaagctctttggtgatctttggccttcaatgctgaataaactgctgtatcagttaaaatgtgtgcctggctgcatttaacacaaatctgactattgcagcttaaggaaataggcatttatttttttcacatatcaggaagtacaggggtatcctgtccagtattagtgcagcatattctcaagtccttactgtccctggctccttatgtccttctacactgccatccttagtttgtgtcttttctcttctagtttatgcctcagactcacaaaatgcttgttctccctcctccctcacatcctcattcttgacaggaaagttccaagtagttcccttaacatcttttggacaggactgtaacacaagggatagaggatcaatgagcttggcaccttgcttcccgaaaccaaatccaggttctgttagtaagaagcgtaaatgtccattgggcagctggcagtgtctgccataactgaaagctcataatacaaggatgatttactgccagggcagatgtgatatttaagcaactcatgtctgtaaagtatctactatgggcccagaggtgcagatcagtgatgagcatgactttctttcctttagaaaacttaccacctggaagattgaatggacaggcaagcaaatgactgcaaatgctatgatggaggcaaactcattggggctttgagatatcagtggtagggccaagacatacaaacttgggttctggatggtattgcgaggaatatgaacaactaatggcaacagtaatggctgattttcattgtatataattatgtcagacatttaaaaaattatatatatacacattacttatatcaccctggtgtctttttatccctctgtttacacagccaagttatgtgaggcaatatgaaattgaataactttcccaaggtcagatagctagtaatttagagtgctgggattcaaactcaagacagtcaacccctagaacactcttaatctgcaatctatgctgaggatactgagggagctccatttgactatttgttttgttgttattttcttttgtttttgaaaaagcgatccagaagtttctttggatattgccaattgtgtagaaccctttgattcattcagcattcataatatttcgtaaattggatttacccaggattgacaagctttggtttggtcattcaattatatagaaggacgttgtgctggaatcttctcagttagggaagggtaagttgcatatattcacatttctctaagtattttgaaacagaatacttttcagtatgtcattccttagtcaaaatatcctgtttcaacccttaatcttaactaagactcagtcatcactcatgtgaacatccatattcctagagatgctgtctctctcttccattttctagatggccctcctggcgatagcagcttgcttgccttggccggggccttgatttcatgatgctcccttcaataccttatgtggtagacggaattctaagatgacccccgccaaagactgacacccttgtataatagcctcctcttgattgtgagagggacctgtgataatgacgtgctgtcacaatatcactcccatgattaagttttgttatttggcacaattaactttaaaacagtgagattacgttcagtgggcctgacctaattgagctagcctttaaaagggcaaggctcttcctggcaagagaaattcaaaatgtgagagagattcaatagaagagagattctccattgctggctttgaaaatagagagggagggcaaatggcaaggaactgtgaatggcctcaaggagctgagagtggcctcatgctgacagccagcaaagaaataggacgtcagtcttacaactgccgggaattaaattctgctacaaccgcatcagtttgcataaggaccccaaactccagatgagaagatagcctggctaacactataattttggccctgtgagactactagcagagaagtcagttattctgtgcctggactcctgacccatggaaactgagagataataaattcatgttgtttgaagctactaagttttagataatttgttgtgcagcaatagatagctaatacaccttcactgtggttccaaatgtctaactcttctgccctgacctcaaatgtgcgtaagtagaggaactcacccaggtcatttagttggtactagaatgagctttgcccaaactatactagaagcattactaacaaagtgaggaatagggacccaatatccaatatcataggaataagtgtttttatttttgttgtttttatgaattgtactggaaagattttaccagtgtcttcccatattacataccttataacactctcccccaggactcccaaaagataaagacaagcaccatatgatatactgattagaagtcacagttcagtggaacagggacaaagtccaaggtgaaagaagatttaaaaaacgcaaaattagtagaccatgcataagggttttccacatagtgagaaacaatttgatgctccttttcttgctgggtgaagtacagaccctgtggagtgggtgaagaatgaaaatgctttatctgttggtttctgcttcaaggtgtactctagcaatctattttagtcttcattaacataggaagattgagctcggggttaaaacatagtaggcatcatttgttcagaacacacaatggtattgcatggggatgggaggcctaaagatttgtggctgtgtgcatttttggtaactgcaaagttggaataaggcagctgcctgtgataaaatatgaccctcactcactcttataaattgcttttgcccattcacatttagaggtcattaatcttgtttccctttatggatgggcattcagcacattctccacaattgattcagctatatagtttagagaggtataaaaattccacaaagtgctgctggagaaaaatgtcgcattacaagggtacaagtaagcagggctatctttatcttacttacagaggaacataggcatttgcaaaaggggctgtgaaaaggatcaaagaaacaagacataaatagccaataaataatcataaattcttagtctagaagggacgtgttaaggctacacaatataggaactcccttttacattattgataagaaaacagtcttagagcatatggttgaaaacatcctggatgtaggggaactagctagcttataagacgttccaatctttccatgatccctttaccacccaggagagggatgcttactttgaacatacttatattatattgcaactgctatactttgttatatttttttctgattttcatctgttccctgtatcctcagtatatagtataatacattgaatgtttataggcacttagcatatttttgttgaatgtaaatttcattgaactcctagctccaatgacaagaattctagatactgtctacttatcattcaccttactataagaatgatagtaaaaatttagccctgtgtacatggctaaggtactaatactctttgtatgatcattcttttctgatacttttcctccaggccattccaatacagtttgacagttgcttccccattaaacctgatggccaatcagaaataaatgtgagttaaggtatctggtcacctagaagcaaaagtgcttcagccttaaatgtaagccataaagccaggggagggcttcaacctcctgtcctttatcttttatttaaatcgattgagaatgttaagccactatccagtcaatactgaaaaaaagctagagtatattaattacagctaaagtaatattccataaagtgtttaatcaggaggaagtatatgtcattgagcaaacacaagggaatttaaaatcacatcataatcaaatgaataaatatttcactttctatgatgttcagggcctgttcttgctgctgtacatggaaaataaatgtaataactatgacacaatttcccctctctagacaagcttaatttgctactgcagagttagaacaatacacgattactgtgatttccttttgaaagggtctctgtgtaccaaaatgttgacaattattcagccagtctttattttctgtggaatttgtctctaatggctgcccttcatgtttgaaattatgtgaaatacagcctgaacacatttgtgtttcagaacccgggaatatgaagatgtgtctgttacttctttccacttcatacaaggtataaccaagtctgtaagctgcctttctcataatttacaaaagtagaggatttaatgaacactttctaaggagccccatgcagtctcagaatctctgctccctgaaatgtagcctatgtgtacaaggtcttgccacttctttgcatatttaagtcctcaagttaaataataaattatgacacgtggcgcatacaaaaatgcaacataacagtctaatggacgtaaagtaggaattgcttgaagaatgaatcctttggattatatttgtatatggcttcctgcattttgcagggattggggatagaggagaataatgtatccatcctttgttcgaaaatatttattggtgtggcaggataccactcaagggatgggtttgaggaacaagagatgaccttttttctgtgactcttgatatggctgaatagcatatacaaattgagggccggagctgaaatgttccaaataagtgagagatttttagcccacattttcagtctccccctgtgtagggggagacaggaagagagatgaagagttagcaggaagatgacggatgcttgagcactagaaccgagattgcagaggaatttgactgattattcttttctgtgatgtgtactgtgaattcagttttcctctcttcatgagtttttcagtcaactgtctgctttttaatagtaatccataaaactagatcttttggggaaaatagaataaagtgaggattatggtttaatgtaggcatagactaaatagaaagtgcccacctttacccaccccagtaatcaggcttacatatttgtcttatatttggatcagaataggagaaacagattgaaaattttaaacatatagttatgagaattttattcttataaagaaaacttatgggaagcagtttccccagagaattctggaaacatttatgtgtattaatattcttcaaagaaaagtgtatgtgcacgtgtgtattatgtttcctggtaaggttagtaaatgcagtcatgtgccacataaccccgtttcggtcaatgagagaccacatatacaacggtagtcccataagattagtaccttatagtgtaggtatgtagtagactataccatctaggtttgtgtaagtacactctatgatatttgcacaatgacaaaatcccctaacaacacatttctcagaatattctcatcattaagcaatgtataactgtatggtataatgattaagtaagataaaagtaagatataacatcaatagcaacttaaagagatgagggtgaaagatagaggtaatattaaatgcatatttaaaaaagcaaaatttactttttgttttaaaatatactttacaattctggaacattttcaaatcacatttattttcattttgttttgtttttcctcaaaacttcctgactcttttaattctatacaagtaggaatgtgaagttaggggaaataagattgcaaatctaacctttaccctctcatatggagactgtgccttgtaaataatcattccccaattttctcttcagtgagagaataaagttgttcatgtttaatgcaatgagtaataaaatgatgattgatttattatggttataatcagtgacgtgtgttaattaactttatatatagtgccagagggagtaccatacaaagagagagtaagacatactacaagtgggtgatggggaggacgtcacatatcacattgccatgacccgtgctcttgtatatactatgttgctgggcacagggttgcttaccttggttcttcaatgcagttgaattgaaaatgttagtacaaatgcattttagaactatttatttcaacagcaggcatgtaggcatagatcccaactaaggaggacattccaggcagaaatgaaatggtagtgggcaggcttggggctttgttcaggaattgagaacagcatggggtaaaaggaagacatgaggtctgggattgcaaactgccccacacaacagcaaagccctgattgatctgctgatcccaacccaggagctattaggtgctgtcttgattctaactagctttcctgtggtcgcattggcatttcaaggttttcgtaacaaaagcaaagtgcactagtatctcagatagtagatactctcttttccttaagtgtttaacatcatcaaggtttttttccccagttgtcttcctcaagctttcaggttcagtttttttagttgttcttttttgttttttgcctgtgaattggaaggtagtgtttcctgctggtaaaaatcatagattttggtgccaggctgttctgggtgtgaatttggtctctactttttagaatctatatgattttgacaagctactaagtgaacttggtggtcagatttttcatctcttaaatgaggataatcatagtgtgcgcctattaaggaaactgtattaagctcttaatacaatggttaaagacacagacttgggaaccagtctctggtttgaacttaatttctattgcttgctaagtgtgtgcctcgggcaatttaacttctctctctcagattatttacatgcaaaataggggcaataatggtacaacctcatatggctatcttgaggattaaatgaattattttttttaatatagtaagaacactgcctggcttatagtaaacatcatgtgagtgcttattatgcaaaaaataaagtatttagtaattattaactgttagtactttcaaggttgtttttgtgaataaagaagataatattagtccaatgtctggcatatagtaacattcaatatgggttagttcttgtactctagggtaactttaagctcaaatgttctctgagtccacagtaattaattacaaattaaagtacttagcaaaatgaattgactaggtcaatttatatcttatcacactattcttatttctggaatcttaagaggtttcaggaaaatataataaatcacagagagtttaaaaatcaaaataaaataataaactcttctgcaaattcccagttactattctattttaaagactgaaatgaaacagaactgaacctaagacccagatagtttactgattctactaagacaactgtggaagattcatgagatcgacacaggattccagagggctctgaagtgaccacataaaccaagaccttgactgcaacaatcacaaagcaaaacagtgtggggatctgggtagctttgaatatggatgcatcttttctacatctgctagttttacctgctgcaacttcatcagctttcagatgagaaaatcgagacttagaagtgggaagtcttggtgccgagattatataatttatctgcaattcagcttagattaaatccaggcctcacttttcccagtgtgcttccctttccactaaaccacgctgtgcctcccatctagttatttcatagttgattccatgatgctcttctgtagcatgggttggacaaaagttctataaacttggggccagccctatggccgagtggttaagttcacgtgctccgctgcaggcggcccagtgttttgaaggttcgaatcctgggcatggatatggtaccactcaacaagccatgctgaggtagcatcccacatgccacaactagaaggacccacaactaagaatatacaactatgtaccggggggctttggggagaaaaaggaaaaaaaaaaaaagttctataaacttgtcttcttagaatttctccaacccttttcctccaaaagtaatttaggatttgatttgtgacttattgggttgaagttcattctgcctatgtatttgctattctagaatccaaagtgaccttagatctctgtggatagtaattgcattgcatatgttcagctcacggagctgctgggtaatggaaggattatagcattgaataattcttcctagattttttttggtttttaaaacccatacagagtccctgtagagacttatagacaactttgaagtctttcatgatgcataaaattagaaaaaaaaatatttatttaagacttaatgagtaaagcattgagcatggcggatatgtattagccaaggttctctaggaaaacagaaccaaaagatacacacatgcacatatttgctcagcgcaggttagttttttctttaaggcctttatctaattggctgaggcccacctacattatgggaggtaatctactttatttagtctactgatttaaatgttaatctcctctaaaaaaaatctttatagaaacagctcaaataatgtttttgtttgtttttttctgtttttaagaactgataccaaagaccatcctttattacagtcttggtttatgattgttgcatggaactgttaatttcaggaggaaataacagtttccggcttagagaacttggagcctcacctaatataacaaccaatttatacaatattaaaaagtacaagtgctcttgttgggcaagggacaatgctagaaaatgcatgaatgtaatgacactgaatatgttatgtccgtcctagaagaaggtcaccaaatacatttctttgctctatcattggtaagaatggcctctctgatactcaacacaaggtgagcatgtttttacaccaaatgttggagtgtaggttttccaagttcaaagtgatggtggccactggtccttgggacttcaaattctgcccctgctgtttcatgactgaccatactctaggaaaatagtctgcaaataaactaaatatcaatctcactttctagcccaaccaacagtcattcatggcataaaagatatctttagtcaaatcatgtttgactaaatatctgagaaccatggcttagccaagtcgacacataaaattggccatcacaagttcacctcttgttaacttagcacccatacagatctccttaaaccatatttaatctccaaataaagacaataacaaggtcatacttctgcataacataactatcttgcatgtgatcgaaaatgcactagccctttccaaaactaagagagaatgcagagtccttgaaaatccttgagtgatgtttattcttttccttgatatcctgtaacctaaatactatcatgtaaagttagaaatacttaaatactatgatataaagtcaatacatcttatgttacaaggtaagaggataagagagggaagaaaaagatatttgcctagtatacacacacacacatatattgataacaaaataagaaatattcatgacaattacagtcctcagttctataaccgtttaagtgattatagctggtatttatagctactttcttccactgctcattccgtcttccctttgccatctgcaagtcctcaactgatatggttctttacctggtagggtggcctaaaccttcatttctgaagattctgcactattagtagtcctcctgcatagattgtagcaatgctaagagatgccctaagagatctcctgtattccagacatgctcttccttacctccattgtggagttgcagtctaatttctccttggtagtcaggatcaatcaccacaacctgcacgttaactctcttctgttgattcagaggcatgaggatcccaaaggttctgggtggcagtcttaacttccagttcaatggaatcattattatgtctcatagaggaagcattcctctcttttgcaccaagacttttaggccagatgagcataaagtcattgaaatagcaagcaaaaactttctagtgggtcagtgagggcaatagtatgtggttcactctcatttccatcgcttgagccctggactcatgactcttggctacaggagaaacagcaccatatatagcaccatatatgtatatgatacatagcacaatacatcagatgctaactcagagcatatacagagaaccttgctcaagcctggcaaagtattgccagctagttggcagtataactggatcttcagaaggccattccactgttttttcaagccagatgcttctagatggtggagaacaaagtaaccccagtgaattccatgggtgtgggcccattgccacttcatttgctgtcaagaaatttccttgatcagaaacaatgctgtatagaataccatgatggtggataaggcattctgtaagtccatggatggtagttttagcagaagcactgtatgaagggaaggcacatccttatccagagtaaatatctattccagtaaaaacaaaatactaccctttccatgagggaagtggtccagtataatcaacctgccaccagattgcagactgatcacctggggaatgatgccgaattgggggctcagtgtgggtctctcgtgctgggagatctggcactcagcactggctttagtgaggtaggccttggtgaatggaggctcatgttgcttagcccttgcaaacctccatctttgccccacagccactttgttcatgaacccattggtctatgacaatggtgagtggggaaagaggctgactagtgttcacagaataggtcatcttattcacttgattattaaaatccttctgttgaggtcaccctttggtgagcacacatatgggacacaaatgttttcatgcattcagaaagatctgtccacataacttcatcccccaacttcttgtcatcaattttccaatcatggtcttttcaagtccctgaccatctcaccaaaccattggtcatagcccatgaattgatatataatcacacacttggctattgcttcttccaagcaaagtgaacaaccccgtgccctgctcaaaattctgcccactgagaaggtttctccttaccactgtccttaatgtcccagaaaagggctgtggtgctgcagccatccacttttaggtgttaccgctgtattgtgcagaaccatctgtaagccaggcttaagtttcctcttattttgccaagttatcataaggaactcccagtaaggtcagaggtataggctggagcagaaatggggaccatgagcatttgggccacttcttcacttaacttacttttgcctttagggccttctcaagcctgatatcatatccaccactagtatttgatgatggagtgctgctgtgcatgcccaacttatggggtgtcatgagagaatatccaggtcatggtaactagttcagatcacatggtaacttggtggcctgtggttaagcattccttctctactaagatcccatagcaagccaaaagctgcttaccgaaaggagagcagttacctgcagagaatgccagagctttgctccaaaatcctaagggcctgtgctgtgattcacctatgggtgcctgccaaaaactccaaacagaatccctatccaccactaccactttaaccaccattgaatctgttgggtcatatgaaccacgtggcagagcagcttgtatggaagcctggacctgttgcagaaccttctcttgttctgggccccactcaaaactagaagcttttgcgtcatttggtaaatgagccagagtatcacacccaaatcaggaatgtgttgctcccaaaatccaaagaggcccactaggcagagattctagatttaatgttgcaggtcagggaattagaaagggctctaacagttcgtttggttggttgactgaacatcgatggaaagatggcctacagtaagttaacttgaaatgctagacctgctttgctatacatagatgaaaggattcaagggtttaagaagaatgaaatgttagagtggatttgtcatttaagatctgctcacccaccctaggagggtccagaggacatacctttcaccatgaccttgagaaataaatttgcgaggggagcaccagcagccttggggaggtctctgatcacttttctctgtagcttagaaaatacaaggaaaattgctgcccctgaattgggaaaccaaagtgaaatgggggtaattggctcccaggtggcaggggcaagtggtggcactcagtttcccaaggcaagctgagtgtggttaccataatggaaagcagaggtaaagcagcaatcacaatagttggctcacagagacctatgacctatgacgggctagttgatcatggtgttcccagaagttaaaaataggaagcctactcaaatcttacttgatctgtataagtggaagagtgagcaaaagtccaacttgaaccataaaaacagagagttatggtctctcagtcaattcccagacttgagccagtttacagactcagaactccttgaatgaagagaaggccaggtccccgtgagaaaggactctgctatactaccaaaaatttatattgttaatctttctcccatcccttcccaaatgacctatggccttttcccagggtgactgtgtactgagaaaaaggaaataatcaggtctttcagggacttctggacactggctctgaactggcactaattccaggagcccaaaaatgtcactgtagtttaccagtcagagtaggggcttatggaggtcatatgatgagtgaagttttcactcaggtccatctcacggtggatccagtcgtcatagaacccatcttgtggtactttacctggatccagaatacataattggaataggcatactcagcagctggcagaattcccaaatttgaataaggtactctgtttaatccttaaagaacccataaactaagaaatgagacagacattttcccatctatgtacaatgggttatacaattttttaagttttagttctcaaatttattctaaaatttcctaaaatttggttatattatctttgaagcaagaagacattttgtttgcaagttatcaatattcttgccgatagatgcttcatcatttaaagttttgtctagttaatgaaagagaactctagagttttgagatacaatataaaaacatttgacagaaaagtaattattttctctcaaaattatttaatggtacaggttgtctctcttcactgacaattatctatatttgttgagtctccatttcttagaagcttcctgtcctattgttgggcttcacttttatcattgccattttgcagctctgtaattagttttctggtagttttcttcaattgaatagttcaatgtgatttgaacttaatgtgatgaagtctaatggatagctgttcctgctgccttcctttgattggccgtgtagagaaacagaagcagatgcacttggtgaaagtattcaaatggtcatttcatgtcctggaaaaccttgaacatctaagtcttcttactttctcatctcttggcaagagttctgtcaaggactttaaatttatgtccaagtttttatcacattcttttaaaaccccatcaatcagcagaataatttataatagtggcctaacaaattccatgtcataattttcacttttcttaaaaaagataattcttcactcacaattaaccaatacatcagtgaattgaggttattttcttttgtacttttctttttttgaggaatatgagccctgagctaacatctctgccaatcctcctctttttgctgaggaagactggccccgagctcacatctgtgcccatcctcctccaccctatatgtgggacacctaccacagcatggctttttgccaagtggtgccatgtctgcacccaggatgcaaaccggcaaaccccaggctgctgaagccaaacatgcacacttaactactgcgccactgggccagccccttggttatttatttttttttaatgtttaagaaaatacctggaatacattataagctctagctttgccctgttatcacaagtgacttattttctgtgccaaaggagtcttgctcaaggatccttcttttaagtgtagtgaaattctttgtctgtctcacatgttcccccaaacagacatctcgggctataacagaaaatgtgtgtgtttagatggagcatttttatgaaatgtacagcattcctggcagcagatttgtttggttgtcaaagcctcaatttcaacaagctagaacagagtttccaaaaaccagagtgcagaaattgaaatctctggtgtccaaggaacgtcacttgtctgagaccgtgcttgtgcttgaggaaaggttgccaagatcgcgctatagtttgcctcgtaaaggtagagctttcactactgtaataaaaatatggaaacattagaaatgatgggatgtgactgcactctttttttcatggttgcacagttttatgttatatttccaaaggatgccttaaaaatagacctggcgccaattgcagccaggaaaagaaatctttgaacttgaacagtgcattgaaagccatctaaaacagatctgaatctagaagatgtggagttgcttttaagatctcattgactctacactgattatctcttgggttgtggaagaattattactgatcttgatttgatcctgattggggaatttgttacccatgtatccatcaaggtggatgtgattctactctctataagctcttttattctgctagaaaggatttcctttggcaattgaaatggatctttcagttcagctaaattatcattgtatcttttgaacctccaaaggcattggtgtgttatattgttctactgtttgggaaattggatgagaggaagagaagaaaatgaaaagtgtaaagttttgcccctgagttgtgtcgaggagagaacatgggcattaaaattagcaggcactagggaatgtagttacaagcttggagttctgaggtcatcattaaagtgaataaaatatcagggtctattttgtagagttgcggaggagatttaatgagacaatccatgtaagtcacttagcatagtgcttattgtttcataaatacatgtgagcaattttttatgctgtttgaatcacagttctagtaattactagctgagtgaccttaccctaggtatttattctctcacacctgtttcttcatctgtaaattgaagataatgagacataacctggaggactattgagtattaaaattggtgtaaagtgccgagtgtttgccatttactagttgatcaatatatactagtttgctcccctcttcactgtcactcccagtaatgacaacaaaacaataatagcaaccagtattactaaatgcctcccaagtgtcagtcactatatatcctacacaaagacagtcactcaccattgtgtttgtaggagaatgatgtcaggtatcagtggcacggattcacaattctgtcaagtttcggagttgccattgctttgtgttgaataattttagcttttgtttttgattcatctgtaatgctttccattatttcttatttgcccattatgaagaaatcaattattttctctttgctctccagcttctgctggaagaaaaagtaagatctaatctaaagatggactgaggttatatgccttcttggggttcttaggtgaactttctacctctacagaggagttcttttgtagaccctggaggattcagaaagaatgtcaatattacatctcattgtctgccgctcagcaggaaaaaaatgtgcacctcacaccaggtatctaagtacaacgtacaacagaaaggtttcatttttcagtgttgcctgggtccttgcagcttttcaaataggaaacatattaaatccttatggataagccatttccttcaagattttcaagtggtagttttaggaaaatattactttctcattgcttagcaatagttctttcaaggaccttgaattcaagttcaaatttatatcagattattttaaaacacaattaaccaacaacataatgtggtaaaagaagcacattccgatgattgatttccttgcagcctccattcttttccagaactctgggcagtctatgtggatgggaaacaatggattgatttaatgtaactgggcacttaatacagaactttgataagaatgtcgagacttaccattagaaaggatgctgccatttatttgctcatttcccaagagcagaaaatctatttcagcgatttgaataagtttcaatgaagtatggagaggcactggattccacgacctcccacttgggtcaaggtaccaatttaccagaacaatttattttaaaataactttatatatgtgttatatcgttttgacaagagaagatggaattttaattactaattttcccagcctcagctctcttaggttttaggtttgaagaagctgaataaaagtgaataaaatttgtgagctagattattgcagtatattctaaaatttttgcttttactttttgctatagcacactaattgctcttcttactaatttgcttcaaaatgggaattattaatttgccacaaaaatgtgagttatttcaaaggcaatatgatatagtggtaatagtacccagtccagaattggtaaacctttatcattttgtgaatttagagaagtaattttatccctctgagaccctgtaactttttcttacaagtgagataatttgggtaggtgacttctgtatctccttaaattctaaaattctaaaagtctatttgtcttttattgtctctttgaaggtatagctttatatcatttaaagttttaaaataactctcacatgaatgaatgaatgtaataacttggcctactgcaattttatttttacatcatttatttatcacattcattgtcaccttcaggagtcacttacctttcccaggtttgcataatctgaatgtaaaaatgagaaatttgagcaatatattccctaaggatccttccagtcctaatattttgtgtttctagtgtacattttttgaaatcatataaagtatcaggtatatatttctcagtattgtaggagatacaaagtgaaaaagacgtgacatctgtcctagagagagtttttaattttcattgaatgacacttgtggtatcttagtctgtttgggctgctataacaaaataccatagactgggtggctgataatcaacagaaatttatttatcacagttctggagcctggaaatctaagatcaaggtgccagcagaatctctgtccatgagagcctgcttcctggttcacggatagctgtcttctcaccgtgtcctcacatggtgaaggggtgaaggatccctctgggagctctcctttgtaataacactaatattattccaaagggctctactctcatgacctaatcacctcccaaaggctccatctctaagtaccatcaagctgggggaatagatttcaccacataaatttggggaggacatagacatttagtctacagcatgcgggattcatgaaatcactaaaattatgtgtcaagtgtttgcttatgtttattttttgaagatccacagctttcctaagaattttgagtacataatgaataaaattggagattctattgtcagaatctcgtacagtggttcttaaaatgtgattggtgaaggagtggggagtcccctgagatactttcgggtggttcaagaagtgaaatctacttccgtagtaacactaagatgatcttttcccttttcatttccattcactaatgaatgtgcagtagaattttctagaagctccaagaagtcttatatcataacagatacatatagaagcagatatgagaatctaattatcttctgctaaaccagacgttaaagatagttgcaaaaatgtgaaacaatgtcattcttcttactaattttttcgttctgaaaaatatagttatttttcaaaaagctatttatatgaacatacaataagtttattattgttattttgaaattaatatatgtatctattttaaatttcttggtttaaattctaatacgctaaatataacagataaagcctacacaaacaaaagctcttcagagtcctcaataactttataagtgtcaaggactcttgagattaaaatgtttgagaaatgctgacctagtgcctttactaaggtacattaatctgtagtagtaaacatagcctgccttgctattaactttacacaaagagatttatgcctctctcacctaattgtctaagtcggtgttcatgttagcagggtaactctctaacatatggtaattcagagattcaagctggtgatgtggctttgccatcttcaacacttgactttcatatttgtcagacattgacatcctagtcacatggaaaaggaaaggagcacagaggaagagcagtaggtaattgttgccagaaacccggaagtgtcacttatcatgttcactcattggttcactcattccattccgttggttagaactcagtttcctggccaacgccaactgcactgaaggctgggaaatgttacccagctgtgtgtccaggaagaaacaaaaggtaatcttcaggaacagctagaagtctctaccacacctaagtttaatctaggtctactaggtactagctaagtaaacaggccaattacgtagctgctaattcttagtttcctcttaaataaaatacgtataacaaatttccacctttagagggttttggtgagggagattgtgcaaaagtgcttacaaaatggataggtataaatttatcaaataactatgtgtaagctttttaaaggtctgtgatccaaagaatgttaaatcaatctgctagaggaatttaacatttaggaatagatataaatcttgtaataacaataactacaatgaatgatcatgtgtgttataggcaataaagtttatgcaaacagggggcactttttatagttagtgctttcatggaagttcttacttggaaggtctttaaggatgttctcaaaatatctaattggtgtttctctgttctggaatttcattacctcctctcagtactcttcttgtggcacttatctgaccttcaggtaatagtgaattttcttgtctgcctcttttattagtttttagctctatgagaacaggactcctaccttactctactggtatgtcttgaacctagcacgatgcctggcccattgtaggcccttgggtagatatttattgaatggataacacttagtttcaatagaagagaagttgcatgaaaggaaaagaggagatcattgtaaaggggatgttaagagattgtgataaaagagtgtattttgcaagtttcaagtataggctggtataagtaaagtgtagcaataatgcaggacatcaggaagcatggaatccacatgttagaggagtcattactgtgaaaactcacataaacaaggatataaaaaaggatgagaaagaaaggaaaatgatccatgtcctaaagtcattaaaggtctagggagtttctagtgacaggacaacaatggagaaaggctgatataagatggcatcaatcttaagggatgggaagttattgagaaattgtaatggaataatggtttgaaatggcaactcaaatgtttgttaaatgaacagatggtgggtagatgtatagatgatggaatactgcttttcattatatttccctatttgaccttccaggcgaaaagtgtcagaggaaaatacattttcacttgaactgagcagatggaaggaatgactacttaagagttggaaaatttggagggctttatcctaaataaaacatgaataccatggaattcaattggtccagaagatggacacttgagaaagagttgaattgacttcgtctgacctggattgaggaagtattctgagagaaagttgcaaggggttttgcataaagtgaaactgtggaaagtgtttaaagagatattcctattaggggaatataaaaagtcagtttatgaggtatttatagaatgaactgcatccagttttccaattggtgtggatgagtccaagtttgcatcttaaatatgaaattgatattgacttacctcttaaaactaagaagaaaataattttttgcaaagcacctgttggatagatcatcctttagctaatgtttgcgtaattactctctttttagtaagattttgctatttaaataaacagaaaattaggcagatgatactctcagaggtataataaaattgaattgggggagtctactgtataaaattgaagtgcattataacaacctatggagatggcatgatcaaacatgatggtgggatgttttgttttgttaaaaatttgagcaatccaaatgaaaacatggcttatatatttgaaatgttagctttttctctaaagtatgtttattcaatctacaaatgcttattgagtgtatagtctgaagcaggtttggtactggattccagggatatgaagataaataccacagagttgatggctttgagtctcatgttttggtaggtgaaataaacatgtggcaaatgaatgcataacttgtgatgtgagcagtaaggaaggcattgataagatacagaagtaatgtatttaccttcctgaagatagcaagcaaggcttcacagggtaatatggcagcaggctctgaaggctgagttgaaggttgccacgtgaactagagactgaagacatttcagaatgagcaggctgcatgtgaaaagacatgggggtgtgaaacagcacattgtgttcaggaaactgtaggggatttgttatttctgaaatgtagatgtgagaatagcagaagatggtacttgatgccttaggtcgaaaccagaaacatctttcatgccatgtcaagaagtttgggctctttcttgcaagtgcatggagcctagtaaggaagcaaatatttattggatgaatgaagagggcatgactgaaggattttaaataaggggtgtagggcccagcccagtagtataacaaagtttgtgcactccccttcggccacctggggttcgtgggttcggatcccaggtgtagccttacacagcgttcatcaagccatgctgtggaggcatcccacgtacaaaatagaggaagactggcacagatgttagctcagggccacacttcctcaagcaaaaggagggagcttgtcaacaggtgttgactcagggccaatcttcctcaaaagaagaaaagaaaagaaaagaaaggtttacaatcatgtttgtttgtttgtttgttaatcgttttatctgcagtgaggagagaagtttgaggaactgcaataaggaaatgattgcaataaaccaaacatttgataatttgatactaatccaagagaatcaaggaatggacaaataagtccagtgcttggcacagagtaagcaagcaatgtaatttctgatgaagattcgggcaataggaagatggatatggtgatgctggtgaagggagactgagtgtgaaaggtatctaaaagaaacatatatttttctgacatcaaagcactagtaactgtcatgtaggaactgctcaggaatatagtgtgctgtgccagacaggacccagaacagaaatgttgctctctaaattctctataggtatccatttgcttccaaatttaaaggagatttttttaagttattcctgatgtcaccattcacaaaaggacattttctgctaattaagaaatgataacaaaaccctctagtattcatgctatatttaggctaagaacactaggagtgatttagattctagcaggatatcaaataaggacatttcaaatgaaagcgcctgcagctgacagcctttttgttgctttgagagtagttagtattattgcttccttaaggagccgtgaaaataggctacttaattcccccagataattttctggtatattagcctgagtgatgcaatatgatcagttacatctgatggagtcgatcattgatttgttattctttaggggtgcttaaactcagaagtctcattgtgacagctactgatataatatgtcttccttgaaaataaattctctatttccagtctgtgcttctcttcggcactgctctggggactaaccctcctgataaatccctttagcacgtcagctctcctggcttgctttcttttctgacctgtgacctgcataacaccttggggaggcattgaggaaatgaagttttattatttcaggtcaattggaactctttgcctttctaattttgataattctgcacttcagatttccccccaaaacacatattcctgctacttgccattttaaataagatagtttatgtgaaaaaatacggtaaacttgcaagtgctgatcaaatgtaagtggataataatgtaattattacagtatcgagatcaatggtgagttggtatagtggaattttctgtttacttaaaaatgttacccttgtgtgacattatattaacagggggatatttgtttctgttccattgtcatagaaattactttaatcaaaggagcacagtggctcgatataaccatgtttagcctaaaagcatatcaaatgccagaaaaataacaggacttttcaaggtgatattcctttaaatggaatgaaatgtttcccatgggaatttaaggccaggaaacctgtctgctgggatcattttgccctcaatcactttcttgtactgcctctagtattctgagtgcctgggtcatcatgatcattgtaaagtccctatttgtttgtttgattgtgtattggacatatatcaagtatcagctacgtgctaagactcatgcatgttgaggaaaaacagctgggccttgcttttgagaaactcatggtttagaatggggatacagccaagcaaagccagaatggtgattgcagctcagcaggacagctgtatgcacagggcatagggtcatcacagagaaggaacacacctactctcagctcgttaaatcatgtttgatagtcagaatttagaattttgaggaggtaaaaaagcaggctggaaggaagtaaaatgcatccattggggaaatatctttttctaaaaaagcacaaaggagccatgaattcagtaatgaatttgaaatgaagtaaagtaagcaatacttacagtaagctcaggcaacttataataagccaatatatagcattcttatgtaaaatatatctattttgggtggaaaagttcagcccaagtcagttaaacaagcataactgcatacatattctctcccattggatctttaaaagttgagtaaatttcattctgtgcataattctgaaagcttttcctctcaagaatcatttcctttcaagttttactatataaatgtacttttcctaagccattatcatgttctgaaaaggttttattaacaaccaacgcttattagacccaacaacaatccaagcaagcaaattattctgtgcttacaagctaagcgccaaaatgaaatcagctttggagtgaaaagatcaacatgcaggaggcctaaagtaaagttcagaaaccacaattctctttatattaggcttttgtgagtattttatgggacattccttgagattaattgcaatttttccatgcaaaatctttctcttatttttctcttaaattaataggagggtaaaacttggaaacgtttgcacaaatcaaaaataattgatcatgggggtcaggccccatggtagagtggttggttctcgcacttggcttccgtggcccagggtttcgctggttcggatcctgggcgcggacatggcaccactcattgagccatgctgaagtggcatcccacataccacagctggaagaacccacaactaggaatatacaactatgtactgcggggctttggggagaaaaaggaaaaaaaatttaaaaatcttaaaaaacaaagaattgatcataattcaggttactgtcagaaaacaatcaacagctgatgtattgagcaactgctacatgtttggcaccatcctaattatgtttaaagatgaatgaaaaataagtaagagttaataatccttttgtgtgtgtttgtgtgtgtgtgcatgtgtgtgtgtatgagagagagagacaattagtttggattggggaaaaaagaagtcaggaatgggagacaatcaaaaactttagcttctaaccaagagctaactgcctagtgaagactgaagtgtaaaaatcctaaaggtctatatgaatatgtgtgtgctaaagtcattgggaaagtttatttaataaggtggagattttagaggctgcgcacaaaatttgtcaaagaatttggtaaatctaggctgaattttcaaatagttctatggcaaacctttttctgaaatggaaaagaaaattggaattcagcatccagtcacaagactagggtaattgctttcagtcttgcctggattcactaaccgcactgtcgggtaaaaataacattcaaggggcaacagagaaaggagttgaaagtgggtaggcaagggctttatatatctaaatccattattgttgggattattgtaatgaagacactgtacaacagtgtctagaacctggaagaatgcggtctgggaaaagtaaaatggaacccggttttggaaatgcacagaaaaaatataaaagctgagggcagccagtcatgtagagagacattgtctgaagtgaggcaggaaaagggaacacatatgactccccttttgcatatagaagttcctgtaagagttggaccttctgaggacccaaggcatttaggcagagaaagattatccgcacagcttagtaccaccactggtgaaggttgaatgaggcgggattgccactgctgccccaagtcaaggcacatggtgcttctgtcttagtctgcacaggctgtcataacaaaataccatggactgggtggcttaaacaacagaaatttatttcttacagttatggaagcttgaaagttcaagatcaaggtgccagcctggtaggtttcttctcttgaagcctctgctcttggcttgtaggaaaactttgctcacgtgaccacttctttgtgagcacacaaagacaaagagcaagctcgctaatatctcttcttaaaagggcactaaccccctcatgagccttgccctcatgacctcatctaaccctaattatttcccaaaggctccatctccaataccatcatattgggggttagagcctcaatatatgaatttggaggacgggggcacagatattcagtccataacaacttctttccttaggtaatcagccctggaaggggaatttcaaacgtaggcccctgctagggttgccaggtaaaatccaggacacttggttaattttgaatatcaggtaaatagcaaataatgtttcagtataaatatgccccatgcaacatttggaacatacaaatgctgaaaagtatttattgtttatctgaaattaaaatttaactgagcagcctgtatttttgtttgctaaatctggcaaccctaacccctcatttatgggtcaaaggctttcgccggcctaaccaaccacttattcactgcagaccaagagagggctaagatgaacagaccctgacagctctgatcactccggctttataaattggtatttggggattataatgatttgttgtatcacagagatggtaatttttcagcttcgttgttggctattgacaatcctcatcatcttctatcatttagtctttggaatgcttgagagtttggctgttagctcagttttaaaacacctaaagcatgcagttttaacgtttaactgaaaggcatgtcaaaaataacttctctgtctactaaactgacttaaggagagcagaaagccaagcctttgttcaggacctcctctgtcaaggtcattggtagtgcttgctgcgagtgggtggctcagccagcttccttcatttccccaaagagagggctctgagttaggacaagagctcatggggttagcagactgagatttaaattcaagttgcatgatgtctccctgcatggactcgggagagttattaaccttgccaagtttcagcttctataactcccaaatggaagagcaacacacccaccactcgaggttttgttaatgggatgatagtaataacagacatcctgatagcacctatgatgtgccaagtgtggcaaatttattaatttacttattcaacacactccgtggaggtttacattttattattatctgaattttgtagatgtggaaatggaagtacagaacagttaagtagtattgcgggtccacattgtttaatgtctattattattattatttttaccatcatcagtatcatcattatttttgtgcttagcatgggaaaaccaacaaagccatgatcatttacttaaaaattcaaaatgtccctgaaaacacttggtttgctgcttagtaatttggaacctcaaattattttgattaaaaaaatatattgagccctgcgtcatgtgagcatggcttaattgccacattctttcagttactttgtcataaagttagacattttgcagttagcaggagggaaactcgtctcagtgaatttcagtatattcacgtttttatgaagtcattcgcatgttagagtcattccctgtaagacagtatattaagtgggaagaatatgaggtaaagaagacaggtgacattcaatttacaacgtcaaagaatcttctacttcagtgttcctcctcaattgaaacataatgcctgtgttagattttatactttccctttcatatataaaaggagagaaagatattattttctaagattccagtgaaaaatgaatatgatttccaaagattttggtactgccattttttttttttttgaggaagattagccctgagctaacatctgctgccagtcctcctctttttgctgaggaagactggccctgagctaacatccatgccatcttcctctactctatacgtgagatgcctactacagcatagctttgccaagtggtgccatgtctgcacccgggatctgaacccgtggaccgtgggccgccaaagcagaacatgcacacttaacccctgtgccactgggccagccccagtactgccattttaagagtcaaattttatatctattaaaatatgaaatatgataactatttattcatgccagatggtatacattcaactgagaatatttagcaaaatcctgtagcaaattatagataggtaaatgacttagtttatttgggctgctataacaaaaataccatagactgagttgcttaaacaactaccatttatttctcacagttctaagggttgagaagtccaagatcaaggtgctggcagatttgatgtccggtgagagctgcttcctgtttcatagatggccattttctcccagtgtcctcacatggtggaagggacaagggagttctctggggtctcttttataaggacactgatcccgttcatggaggcctcactctcatgacctcacaatcacttcccaaagccccacctccaaataccatcacattggggattagatttcaacatatgaattttgaggggacacaattcaatctattgcagtaaataaatcaatgtgaataagagaaccatccaatcccaggttaagaatgaatattaaaggacatctatttgacacccacttagtttttgtagtcaaagcaacattttcacttcatgtacaagtctatgtggttaataatatagtatttgtttctttaatttagcatctgtaaatgaagaaaaatagctacaattctgaaacatctgctatgaaaaggcattatgaaaaataacttactttactgccataaaaaccctatgagctagttattactgtctttgttttttatattaggaaactgacttgagagttcaagtctcttgtccaaattcactgttggtgagtgttggaggcaggttttgatgtttcttgggtctgtctgctctgatggccttggccttatctaccctggtacttcgcctctctgggggaaatgaaacctttgctgcctggagtgagggatccaggagacaagacatgtctgcacagattccaggcttgcatgcatccatgtgtcatcctccctccctctacctcactgggtggagcaaagagaagggctctctttcagattcccttctgactcaataaatactctgctccaacaagaaagagctgctagtaactcctaaggaattgtttctcaaatgtgttctataggctgcagcttcttgagtctctctagaactaattgacaagaattttgagagtagagaatgtcagagtttaaacttccatgtaattctaaagcaaaactaaaagctaaaatttgaaacccatcgtatggtaaagaacgaagaatgagagagagacggggaagaggagagggaggaggtgcattatattagagtggcaatttaaagtgccattctacttaacatttgccgagtacttagcatttgcaaaagattgggctgggctttgtaggatacaaacatgaaagatgaataaggtactttttttttccctccaaggtataatctcctttcacaaaatgcatgttttacatttaatacattctctagaaagataaatgatgacattcagtatctggccaattcatacttgtttagtagtcaggcttgacttggtatgtgatatacttgatctataagccactcgaaatttctaaatctgttttcttattctttaaaacaaagattcacactgtcttacttagagtgtttatgattttgtgatttcaaattaagtcaatggaaaagtgtagctgaaaacgtatcggtaactgtactattgcatagagcataaggaataatttactgctagtgttgtagtcagcaaaactcaactttcctgaatccacttgtgtgattgtaggtgacctatcatattgaatgttaagtatttatacaaaaatatgaaggattacatattttcacctattgtatttgaaagctttctcaggtattaagttctaagtggggacagcagaattgatttgaattgtctcagtgtaacctgccctgacaattcagggataactcagcaggtccccaggtggggcatgcaggttagcccttccctggcacaaattattttcaaactgcttcttaaagtggatgtctcctagtcaggctttgactggtatcttaaatattataaaaatggagaattacagagtttcataaataatctctaaccaattttttctacttcaaaccctatcttcctttatatgcaggaggcaggctccagtgatataaataaatatattaaattagcagatattatgaatgcgctttttgatttcataaaaagctctacatagttacttaaaggcagagctctccctttctagcagctggaaaatcagggatgtgtcttcttttctccagtactctgggactcaggaattttactgggaaaaaaaagaacacatatatttaataaacctgttttttaattgcagtggagtttgtgagatacgtgggcaaaatgttgagaaacacatggaagaactgattaaaaatatcggccaattatggcctcaattaatatatttgtgagaggcttttttctcaccccagagataaaatgagagcacttttggtaaagtcattaaaagatgagcagcaagcactttttaattatacaccgtttgtacatcttgtgaataattacccggaagtcgctacctgggtgacagtgattgacagaaagctgccaggcaaaggacacatctttaatatgagtaaaggttataagaacttcatctgcatgaagatagcagcacagagcaaggaatacaccagcactcaccattgaggggcaagatttcctggcctctgagtttttggggtgcccagttgccaatgacagcccctacttaggttgaggatcccttcagggtcttcttagatctgtgccttatggtggtggggagttatgccctcacaggttgttctaacaatttttaagcctgcttacctaatagaagaaaattactggcaccaacttcagaatattcctgaatattgaccatggttctgggtgtatcaagtagtgctttcttttgtgtgatataacactagtgggccagcttcaggcctttgtgctctagtgtactggatcttaagaaaaccagctttaagcctgttagtctattgtggaaaccagtttaagctttgtagtctgtttaaaaaaagtagtaagatgggaaaattatgacacacttttatatgaaaagcatactctagggtcagaggcagctgcagattcaactggagagatctgggcagcattaaatatttatctagggattgcagcctgagccctcaggcctgtggacatatgttgtttggctggaattgtgtttttcctctttaagttgaatttgaatatctttggtaggagcatggctactgtttgccacaattctgaaattccctagtagcattttccttggcccacatcacatccactgtaggcaattggcgggttcccagtattatactgtaagtcttggtaagattttctgcccaggcctggaaatcgctgcataattagggaaaagtaggaagtttatttgttaaaccactagagtcagagtctcaggaaaaccataatttgcaaccaggttgaggactggcagaacatcaagggaggtgtggagaacattgatggtggagatcagaggccagccctgaaagacaagggctcaaggtgaaaatccaggccctaaggactggatgattgagctcaaaaccttgaccgcatacgtggacaactggtataggcaaggagaataggagcttcttccatattccctcctcagatttagcatatgtcataagatatgttgggactagttggaacacctggctgagattagctagctaagcaaattttgtaactattagtcatcaatgctttttttctgttttgggttttgttttcctgttttttctatttaggtaacagtatttgaggatagctttaggaagaagggtaaaagccctaagaacttttcctagagcctatcttattattcgcttacctgtcctttatttacttatgatttctacccttttgatcttcactctctttagcatttttttttttttttaactcaccttctaattcccactatggattcctttcctggatctccagaattgattattggcgtgcccagcctgctgccccttcgtcctggaacgcctgatgcatgctgcctacctttacttcctcaacaaagcattgagtactacagtcctaccatcacttcatttcattcacaccacagtctcaggaagtaggtgttatcatacccattttacagatgacaacattgaatctcagagaactataattttataaatattttataaataaattttggaatttattataaaaagtccaaggcaatacatctcctaatttaaactctcatcttctggcctcaaagttataatctttcttatgtgctgccttctaatctacatagtctcttcaagaccaaattaatcattctgatctcctaaagtatggaatgtgtctattacagcacttgtccttttgcaatatctctgatttattgcatgctgcatcctccattagactgtaaaaaacttgaagacagtgtctacgacttactcatcttagtgtccttcataccaggtaaagtcctggttcataaggtggggcttaattattgggaagatgatgaatgaaagatttgttgttaatctatgtatttggttaataccgtcaacagaaggagcctggccttgggacccaggccttatgtatttggtttattttaggcacaggtcacctgaggttcttacttttcttcgcctgggtttaaaaggtgttaataatctaaacaaatccagacagaagtaatgagcaaagctgcaatcagaatttggactgtctgattatatgtcctgtgaagtatgcaataaaggttaacaactaggatatgatcaaagcttacgtagataataaatactgattatcgtttttcttattttgctctaaatcagtggtactgtcgtgtttaatatttgcttaatcaagcactaattttttaaaaagctatctttacattaaaatatttttgttggataatcatttgcaatcttttctcttgttttttaaaatgtagagtgcatcattatcattcttttaatttctgactttggaaaggaatacccaagcactaaaggtaggatgcatggtacagtggaaataattctggactaggtgagagagaagcaggggagttaaggagggaggtcagaggcctgagccccatctctgctggtatttaggcattcaactgacatgtactgagcattcaacaaactatgtgctgggcattatatcagttcagggttagatgaagataaatggagtgaggtcctagggtcatcaacagtttagcagaggaaacaaacaagtgaacaaatggtaacaacaaagaaaatatacaaatatatgtatacacagagagaggtaaagggagagggctaagaagagggaaaaagagagagaatgaaagaaccaggaggaaagaatgatcgactctgcaaggagagcagtaactcttgagctggggagtcactttacctctttgtctagtctgcttacctgctagatcagtgtttcctaaacttcagtaatttttggaaccaacttcataagtttgatagatctaagtactgcttgcatactatttgtttccttttaatggacattaagtcaattcacttttctttttaatgcagctttctcttaaacagtagcatccatgaaatcacaggctggaggagctccttctttctaatacatctgcattgaatttagtgaaattccccacccaaactgggagcactacagactaactctgagtattttgtttacctcagcaaacagaattagtattcaggtagaacaaatgcattcctattgaaatcaactttgaaatagtgtgttactacctacatagtgttcagatgtactaccagtggtatccaacccatcacgatttggaaaattctggacaagttatgctctctgaagtccgttgtctcattagtgttttaacttctgtaaaacttttgttattaattttcttttaaatgtgtcttcctattagctgttaggttattcaaactcccagaggcctgaaggaagagataattttttggattcctcctaagactttgctaatgtcaaaaggattaaaacaaatcatcaggagtcaaggtgggagctcttggctggaggagtttggaatagcccagatgcagcaagaggaggagatcagtctctgaacatgtttattcagactgtggagggtggaagaagatagtccctaccccagcttcacagaagcttttatttgtattgaaaactggtgcttttcacacatgtaagtattgaattaaggaggaataggagacattacagtgaaaagcaagaaaatcatcatgagctttggagaagaataattattctataatttgcttatttatgatacaataataatttattattttaaaattccagaaataaattatggtggcacgagatttaaaaataaagctacaacctgttagagaaattaaaagaaagtatatctctacgaatgaaaaatacagcaataattgtcatgtttataataacatgttggtgttttccctcattgacataaggtttagaatcactttggtttcattttctgaaaccaaggtccgtttcattgtgattttcatagcagagggaatacagtgtggtgatatgtttctaaaagaatattcaatattataattgaattcaatattaaaaaataactgttcctattttgtaatgtagaaccatattaaaagaaagaataatacacaaccttattatgtttatctaaaaagagtttgtagtaaaaatacttataaacttgaaagtaactatcaagccagctacattcacctttttaatgggtctactcattcggatttatttaaaccacagtaagaggcctcccacatcctcctcagccaaagaatgtttctaagaacctatgttactttcactcttctattgattcgtttaaaaaatatttttgggcactgttatgggatgaattttcttccccaaaaagatacattgaagtcttgactgccagtacgtcagaatgtgatcttatttgaaaatagagtcattaattaattaaactgattaattagatgtaattaaagtattaaattaagatgaggtcataccaaagtagggtgggtccttaatccaacacgactggtgaccttaagagaaaagacacagacagatacagggagaatacagtgtgacaatgcagacagaggttattgaagtgctgcaagccaaggaacatgaaggattgctaggaaaccaccagaagctaggaagaggcaaggaaggatcctcccctacaggtttcagagggagcctggctcagctaacaccttgattttagacatctagcctccagaactatgcaacaatatttctgttcctttaagccacccagtttgtgataatttgttatggaagccataggaaactagtacaggcaccaacaatgtgttctggaactgttgtagatatttgatatacatcagtaaacaatacacactaagagttctgcactggtggcatttatattctcaagagggaagaaaaataataagtgaactggacagtatgttagttggtaataaagaatatgggtattgcaaagtagaggtggatggaagaggaagtagtgaagattacagtagtgaaaagggtagccagaaaaaggtaacacttgagcataatttgaagatggtgaaggcatcagccttgtaaaaatacttaaggtgaagtatccaaggagcaggaagccccaagtgcaaagccttagggctggagcatacctagtctgttgggggaaagccaaaggtcgtgatggccccagtgagcaagaaggagagttaaagaaactgaggttggggtggtaactgcgttatcaaatcttccatggccttgcatggttttatgttaaagaaaatggggagcccattgggtgttaaagcagggacatgacatggtcaacctactttttagaagaatcacacttgcttttgtgttcacaattgactgtaaaaggcaaggataggagccaaaggaccagttcataggctatttcaacatttcaggcgagagagaaagcttagaccaaggtgacagtagagagggtaaagagtggttgaattataggaacatccaacaaaatttcctggaatattggatacaggatgtgaaataaaatgacagatagaagataactcctagagttttgtcctctagaagaatggagttgttgtcatctaaaatatagaggcagattgaggggtaaggggcagagacatcttctgtttgggagatctgcttcttttcccaattcttactcctcaatttttcttcctttgtcttttccttttctttttgattaagacataatctgttttattgtttagttcctagatttgttgctttaatatgatgtctatttttaaaaaaaatattaagactttatttagagcagttttaggctcacagaaaaattgagaggaaggtacagagatttcccatatgccccctacctccatacaagcatagcctcccccattataacatccctcatcagtcatcagagtggtatatttgtataattgatgaacatacattgacagctcatagtcactcaaagtccatagcttacattagggtttacttttggtggtgtgcgttttatgggtttggacaaatgtataatgacatatgtctatcattctagtatcataaaaatcctctgtgctccacctattcatctctcagctccccaaccctggaaaccactgatatttttaccgtctttatagttttgccttttccagaatgtcatatagttggaatcatacaattagtagccttttcagattggctgcattcacttagtaatatgcattaaatttcttccctatcttttcatggcttgatagctcatttattttcagtgccacataatattccattgtcttgatataccaaaatttatttatcaattcacctactgaagggcatcttatctgcttccaagttttgacaattatgaatgaaggtactataacatctgtgtgtatgcttttatgtagatttgcattttcaactcgtttgagtaaataccaaggagtccaattgctggatctatggcaatagaatgttttgtaaggaacattttttttattttgtaagaaaccaccaaactgtcttccaaagtggctgtattattttgcattcccaccagcaatgaatgagagttcctgttactccacatcctcaccagcatttggtgttatgtgtgttccaaatactggccattctaattggtgtgtagtagtatctcattgttgtttaaacttgcatttccctgatgacatgatgtggagcatattttcaaatgtctatttggtatttatgcatcttctttgatgaagtgtctgttaaggtgtttggcccattttttaatgaggttgtttgttttcttattgttgagttttaagagttgtgtgtatgttttagataatagtcctatatcagatgtatcttttgaaaatatctcctctcagtctgtggtttgtcttttcattctcttgacattgtcttttgaacagtgggaggttttaattttagtgaagtccagcttataaattatttctttcatggatcttgcctttggtgtatctaaaaagtcatcaccataccaagggtctcctacgttttgtactatgttatcttctaggagttttatagcttttcattttacttttaggtttttttaatccatcttgagttaatttttgtgaaggggtaaagtctgtgtctagattctttttttgcacatggatatccagttgttccagcaccatttgttgaaaagactatgtttgctccattatattacctttgctgctttgtcaaagataattggctatatttatgcgggtctatttctggactgtctatgctattccaatgatctacttgtctgttcttttgccaatactacactgtcttgattattgtagctgtatggtaagttttggatttgggtagcatcaatctttcaactttgttctttttattgtcttggcttttctgggtcttttgcctctttgtataaacattagaatcaatttgttgatatccagaaaataacttgcttgaattttgattgggattgcattaaatctgtagattaattagagaaaaactgacatccttgataatattgagttttcctatccacaaacatggaataactctccatctatttagttcattttttatttcattcatcagttttgtagttttgttcatgtagatcttgtatatattttgttgggtttatacctaagtgtttcattttggggagtgctaaatgtaaatggtattatgcttttaatttcaaatttttcttgttcactggtggtaagcaggaaagtgattgacttttgtatattaattttgtctctcaatcttgccataatttcttattacttccaggagggtttttttttttgtcaatttattaggattttctacatggacagtcatgtcaactgtgaacaaagacagctttatttcttctttctcaatctgtgtaccttttatttcctttcttgtcttattacattagctacaatttccagcatgatattgaagaagagtggtgagaggggacatccttaacttgtacctgatcttagagggaaagcttcaagttcctcaccatcaagtgtgatgttagctgtaggttttttgtagatagtccttatcaagttgagaaagtttcctctatccctagtttactgagagtcctttacgtgaatgggtgttagagtttgtcacatgctttttctgcatctttggatatgattatgtgattttttttttagtgtgttgttgtgatgaattgtattaattcattttcaaatattgaaccaaccttgcatacctcagataaatcccacttggtgttggtgtataattcttttaaaattattagattttattttctaatattttgttgaggatttttgcatctatgttcataaaagagattggactatagttttcttttcttataatgcttttgtctggttttggtattagggtaatgctggccttggagaatgagttaggatgtattccctctgcttctaagatgtctgtttttaatgttattagttttgctttattttactgtaatcattaatctttctctattcctttatttctttttccttttctataattttaattcctgaaggttttgccttcctcctttcttctgtcattctttctttctacctgtgttactcttaccttcctagtttttaactaactggtttttaaccaagggagcccatcccctggaggtggcctcgcagaaagaggcagcctaattctctattccaggaaccatacaagtatgctttacttcagagagatgtagagtcacttcagagtgtgccacacatgtaataagaacaatggttgtattcccttgaggcctactgacaccatggagtttgcttctcaatgattaagactcctttcctagaagatgcccataggtgtcctaaaattgattccagatgtgttagcttttttgatgggttttaataatgaatatctgtgtatatgatggatttagatttcacatattcaagtatttatttttcatcttttatctttctatctgggagggagaaaatagtcactaatgaaggtaggagtacatccattttctgtcaactgtagaacagttgcttttaagctggtgagcttgtttgaccagaatatgtttttctggcattgttttataccctggcaggttgtatttcatatgtcttaacacttgcatccctcctgtcaaggagagtgttgtctgcataaatacaaagtcacactctaataatcttttaatttgtatttatgctgttcagagcaaggctgaattaattttctctgaacagcaggagaaataaaagtgtcagtgggccctacctggatcccttgacaaatgaatgaattgctttcccatagaacattcttccagaggcatatgtaaatatgtccacaccacatgcatttcctcaccacatgcatttatgaaaacacctaggttatatttaatggtagtacttggggagcactgaaggatttcaagagattatttcagagttagagtatatcaatgtattagttatctattgctacatactgaattgcctcaaaattagtagctgaaaactgtaagcatttattatctgacagcttttgtagatcaggaatctagaaactttgctgttttctggcctgtgatctctcacgaggatacagtcatttcaaggattgataggatttggaacatcttctatcaaggtagttcgttcatatagttggtgagttgataatggctgttggcaggaggtctcagtttctctccatgtggagctctccacagggctgcttgagtgtcctcatgcatggtggctggctttacccacagagaatgagccaatagaagacgcaaggcagaagctacaatgtcttgtatgacctagcctctaatgcaacacactcatttataaaatatactgttggttagaatacatcagctctcttcgatgtggtgggggtgtctccaagggcttgggtatagggaggctgacttactggatgccatgactataacagtctacctatatggatataggatatactaaattaaggaaaagatattaattacccttcatttcatagactgttggagtggtccctaagctgtcaggcacttaagattagattgataaaaacagggcctgggaagatctttgagtagtctacttatgcgtttgcttgcagtctactaaaacaaaaaacaatactacctctactagaagaaagactttcctgatattaccaaggcaagatacacttcctctgtttttcataatacccttttcatagtgcttttatgatttgcacttagcaattgttatgatttgtatggtgattactcttccctctatcaacctctgtgcttgaagccattggctttgatataaagcgacagtattattgaagactttgctgagttaatcagctttaatgttgcacacccctttctgcgccatctatatgatgaataattgatctgtcaaacataatactcagcttttcattaactagccatagtgtattagatgcaatctaaaatacaccgatatggcctaattgtttccgtcaaatacattctctttagttcaattaagtgtccaacacagacaactcaaaaaatcatcctccagctttgaaattctgattcagtgatttgagtgttcagcccaaatcagtgcaatgttatcaatacactagttttctgatcaaagactttttgtttttttatttttaggatataatatggaatacaacctagttctgttcattcagtgcatataatatttcaaccagtttcaatcttgacaaccaatttaactctaaaatataacaaaacaggagaacctgctgggttttttttttaagtcagtcttctttctctcacaaaataaatagaatgaaagtggaatgttcacttctaactctgaattgacagtcctctgtcatacattttgaggagttgttattaagaaggcaatatgtcaccactccactgcatgattggctgttctaaagactctctaatgatgaaggaaaagttaaagcattgagaaaaggcaaacatgcagtttctctaagtgtctttttctgagaaagcaaatagttatcttgcttttatcttacgtgtaatgcttcgaggtattagattcctctattcttaatttcctcatctccctaactatgcatctaggtgtgaattggcccaacaaaagccaagttggagaatgttgtttcccaagaaaaatacctggtatgtctctatagctgctcttggggttatagaatgaagagttagagcacctcttgatatgagaaaaaaatgcttaaaccgggtgaagatatagagagttgatattcgtagctgtatatttgtcttcatctttaatcttaataggccacaacaggaccctgttaattccttgattgctcttttacataaatgacttcatattccattcctatcaatattttcatgcattctaatatctatatttgatttcatatggttaaaacccctaatgtgattattgcgcctctatgtcataagttgaattatgttcccttccaaaattcatatgttgaagtcctaacacccagtactgtataaagtgcctgtatttggagataggatctttacagaaggcattaagttaaaattaggtcattaggatgggccttaatccagtatcaccaacgtccttatagcaagaggaaatttgggcacagacatgtacagagggaagacaatgtgaagacacagggaggaggtgactgtcaacaagccaaggagagagaggtctggaacagatccttccctcatggcccacagaagacgctaactctgctgaccttgatcttgaactcctagcctccagaattgtgagaaaataaatttctgttggtcaagccactcaatttgtggtactttgttatggcagccctagcaaactaatagactgtgtttttacatctctgcactccctcagagaaaacctccattgtttaatacattcttcaaattaattttcctctttctgtgaacattctttaccaaactttgtttcacacactttttagcacccttggatcttcagtcttaagacaaggagctcccttctctaaaatcttgcaaattgctttaaaagtatgacccatcataacctgaacagaagagcagtttgtggtcaaaattattttataatctaaaagagatccatagtatagtaatggtggtgtttgctcaatatattttatctgcagggttaaatggtttctgcacatcacatcctatgcatgacaatattcttgacatggcatgaggaatagtagaaatggagtaatctttctcgtcagaagcttttggattcaaagtccacctcctgcagcaccaagatgtttatctaactcctctgaatttcaatttagtcacatatacaattggtataataaattttaccttattgagatttttttttcaatattaaaatgtgataaccacaagagtacttagattagtgcaattttggcacatagtgggtgctcacaacatgtcctccttgttcttgcttcagtttgtaggccagtataactcaccgattatttttctgctgttcctacccttaactagtcagtgtccatattttgatgaaataatgttcttttcttttctatctttcaccctgaggatatcttgttcagaaatatcatcttccttttgattatatgttgctctagttttcaagatcatttttcaatctagtcctgttttatttagttttagcaaattttcctatcttcagacaactctgaattaatgagtatgccctctagctgttattctaatctttgattgaaagtaaacatacagacagtccttgttttgcacagaacatattaactgaaactcgtgcaaaacgtgcgtgagtttcaattaatatagagctgatgcagtgcaaagggaggactacttgtaactctatgggaaagatgaaagacatgcacctctatttattggaccctatcaaggccaatcaattgataaaattggtgtgcctgatgtaaacataaacacacacatttgtctttaagtatatttttgtccaaaatttatttttctcaacattcacagccatatgtctgctcttttatctacttaaaatgttttctcctacccactacccttcatcctattaaactttctgcctacctcaaatttcaaactaaatgtaatctcctgggaatcttttctttaattctcccaggaaagctagtttatctctcatcagttctcctagtactttatgtatctcttaaaatgcaaaaaacaatggcctttggctaggtcagccgtgaggccagggtttgactctcagaaagcaccacccacccccagtatgtacgctctacaaggaactgacttcaattgctacattcttggagttcatcttagctgtcacagactattcagagatgctaaaggaaaggcccagccatataccttgtattttactgagagccatggggtctatgggaaagaattagaaccaaggagttgagacctactggacttagtgggggggggggggggggggggcgctgggtgcttgactgaataatggccctcaaagacacctaggccttaatatctagatcctgtgaatatattacattatgtgttcaaagaactctgcagatgtgagtaaggttacaaaccttgatatggagaggttatcctagattatcttggtgttctagtgtaatcacatgaatccttaaaagtagaagagaaaggaagaagagttagtctgagagatgtgatgcaggaaggagtcaacccaccattgctgcctttgaagatggacaaaggaggcacgagccaaggaatgcagacagtttctagaatctgagaacggctgtcagctgacagccagcaaggaaatgagaactcaggcctacaactacaaggaactgccctcagacagcagcctgagtgaacaaggaaaagaattttcctttcaagcctctagaaactactgtagtcaagctgacacctttccttcagcctttggagattcttaatagagactcagctcagccacttgacttctgacctgtggaaaatgtgaaacaataaattagtctttctttaagctgttaaatttgtgataacttgtgatggcagcaatagaaagctaatccaggaacacagagcgaaaggtccataataaagaccactatgggaacaaaaataatgagtcccttgagagaaaagtactagcatccaagcctgaattagaacctggaaatggtttcaggcaccttgcataggtgcctaggatcatcacctaaaatgtctctactctccagttcttaggagcctgtttctttcctttttattttttattttttttatttttttaaagattttattttttcctttttctccccaaagccccccggtacatagttgtatcttcttcgttgtgggtccttctagttgtggcatgtgggacgccgcctcagcgtggcttgatgagcagtgccatgtccgtgcccaggattcgaaccaacgaaacactgggctgcctgcagcggagtgcgcgaactcaaccacttggccacggggccagccccaggagcctgtttcttgtgtgaagatggttgtgggacaatggaaagcattctgttaccagggagcacatcagttctgctgtggcaatactctgaaaaatccagggcaagcacaggttttcctgtgacctagaggaaaggaaggcagatgtgtggttgagagaccagcagtaccatggacagtggcttgggtggcaccttgtgggcagctgagtgccaacctgcaatagagaagaaggagtaagaaaaccagccgagctgcacacaggcactctgcttatttgtgagaagcactccatgcatggggattcccagggtgaatgaatgccttaggagggcctggggacacagcaggttcttactaattatgtccatgggcacttagagtgttcacatgtgagaaagcattatagatgtctgttctagacatctgaggtcaagttcacatttgtaggtctgaaatctttagacagtcaccatctttaatgattttgccttttatcttggaaatggagggacttcagaattgttaactttaattgagcacttattttgtaatgttctaagcacatttcataagttaactcatttcattcttacaagaaccctctgagataggtactgttagctatttacaagtgaggaaactgagacgtggaaagactatatcgttagcccacagttgcatagctagtatgtggtgacacaagactgaatctagacacatggctccagagagcgtgtttcacatagttgctatagtaaacagaataaagtcaccctaagatgtacacatcctagtccctgaaacctgtgaatatgttgtttcatagcaaaaaagaattaaagttgttaatcagttgattttaaatagggagattttcctgaattatctatgtgggcccaatgtaatcacaagggccctaaaaaatggaagagggagacagaggagaaagtcagagtgatgtgatgtgggaaggactcaaccgaccatttctggctttgaagatggagggaggactcgagccaagaaatgcagctagccactaaaagctagaaaagtcaaagtaagggactcttcctcagaacctccaaaaaggaacacagccttgctgacaccttcatttcagttcagtgagactcacattagatttctgacctattgaactgtaagataatcaatttctgttggttgaagccactaagtttgtggaaatttggcacagcagtaatagaaacttctaactaatgttctcaagtcatataactgtttctcagaaagaaaacgcctgtccccactggtcctcaaagctatctaaaagcatcgtgcttgccagacatccagaatctcaaggttaatgtcatcccacacacacctcaatcaaattatcatgatttagaaattaggaagctgctgtatctaggaatatgctttctcagagatcccacatctgaatgaccaactacccaatctaccatccaaataatactctctttggctattcatacatgattttaactccctcattaacttggccaaggtgctggttttaatgtttaaggcatttctcatcttttctacatattttcttgcccaaagagaagatagtggaaggaaacctattgggcagcatttctaggagagtagacaggtggcttcctctggttaaaagaatcattcaacttctacccactcgtagatactctctctccacctcttttttttttttttttccccctttggtggtagggggaactaggtagctatctttgttttcccgtgaaaactaatttgtattggttcttaaggtcaataaaataagcattttaaagaagcatattaaaaatagaatgttttgagatagagcatacgatcacaccctggaaacttttggccctggcccatggcacacgtctgaagtgtccaaagatcctccataaggactaatttataaaattcactagtcttgtttgctctggggaggagcctgtagactccgaggaaggcttacctctgaaccatattgctaacctttcccagtataccacttaaaacacagcccaaaccaacagagcaaaagaggacctcaggaatctgttatttctgacaaatgtgtctacagcaaaccagatggcattgtcccctgcaggggttggtgttcatgtttatgatatgcctggtctcttgctctattagcttctgagtcctaggcagacaatttttcctcatttcagtcaggactacctttgctttccagttattagccgctgtaaaagcccaccgaacaaggctcaatattttacccccaggaacactctcatgtcctttaaaatttagacaatgctcaaggcaaaacccttagactcagctcactggattacaatgtacattttacactggaaacgttctcatacaattggagatctagagtgaagtaatttgacccctttgaggcttttgaaataattgatcaaagtgaaagctgtttccactcaattcctttacttttctgagtttgtctttcaatatatttatcccacagtgactttcaaaggaattacatgaatttgtctaaatttagtgtgctaaagggaatatcaaaattcatcttaatttcttgagacaaaaatagcatccaatttctcttttccagaggtagtccatgtgagttgggtttactttaaatatagctaatatatgaaaatgtgcattgaaataaaatattgatgagggtaattattcactgttaaaaaaattccaatagcaaatagacctacaatttagtttaatttgctaaagttccatttacacttaatatttcaagagaaatatttttgtgttaaacaagatagaggtagtatttccttatatttttggattgcaatgtttaagcattttactctgaaatcacagaactcttgagtaaaaattctggttcccaaaatgattagatgtataaatttgagcagcttatctaaaccccttttctccaatttcttcatttataaatggagagagtaacagcaattgtttcataggatgatatatatatatatatatatatatctcacatatatgtatatatacatatatgtatacacatgtatatatacgcatatatacacgtatgtatacatacacacgtatatacacacactccatatatatatatgagacatatatatatatatatatatatatatatatatatgtgtagtgttggcacactacctagcatagagtaagggcaataggtaaaagctaacgtcaatgtagttattacttattataaaataacagggaataggtattttcttggcactctgcagtttctgggcaagttatttaacttgaggcaaagaaggactctattctctactgcagcaatggatgctaccatttcattagccccaattatgtgcagtaatagaagatagataattatagaactaatatactttgcttcatttttaagtagctgcactaaatatttattataaaaccaaaaattaagcaatttgtaatcaatgaacaaaaaagtacacctggatttctcattactgcacgtctactcaaatttcaacctagaatcacaaatctatatcaattatttaatttctcattttaaattataacacaggactatcactccaataggccaacttcttttcagcagttcagggacatgaattgcctaaatgtgcaaatttttagacatgagaaactaattctataattttaatcactttaattttgattttgttaaatctttttactcttgattttatatcttctctgggattgaaagatgcattcctagtggaggagaccattactattcctgctatctggagttattttcagtcattgctacttaattctaattctcttagggttggacattgagtgaccactcagtcaatgccttcttaattaactgatgttggacccagtgattttagctcagctagcagggtactttgagttgcaggtggtcctgcaactgatgggacctgacgagagacttgatgtcatggacttcacaattttaaagaaggggttggcctcttaatttacataatgtagttccctgtctgctctcagtttccaatcagttaaatcacttgaatggattttgcattttctcctttctttgcatttgaagtcttaaatttttaatttgttcttcattattacctccctccgttttttcttttatcacacattcttacagatattcaaaatatctgaatgaatttcagttatctctctggctttatctaacttgcaattgcaactcctccccaaggtcattttgctgacacagcagagtgattcaaaacacagaatttagaaaactagagaaactgcaaaagttagtaaataaatgcccaaataagcttattcatccgtgtaatgaaggagtgataaaggatgttttaaagctctttggcagtaccaacagaggagagacatgatcatgagtctcttaaggattgttaaagttgttttttcctgaaaataaatatattgaaagcaactgacaaaaagaaaagataattgaaactgaatagacatgtagatgcaagcatactcttaatatttataggaaggcatacaaacatgggtattatttcttatccattaatgggtttcataaaatttaaaatggaagaattcaaatccaaagatgagttccccacagaatcttttcatttatttattcaattaagaagcagatttaagcacttcctatggactaagtattataattaattgattcttactcttccttctttattctaaacctatcaatttagaaaaacatatgcatttgtaaatcaacaagatgagtgtctatagctacaaccactgcagaatcagcagtaaatgatcaaatacatttaaaaatatattctaaattatataatgaggatcaattatgcataatttctttaaatggtggtacttgaggattatccatgttttacttaactgtatgtctttctatatatattaaaagtagatatacacactaacatacacacacatacagaggaagactttagattcagcttattcattagtcttaggactataacactctgaccatcacagttgtcacacttgttatctatactatggtatagacaatagcagaaaattcatagtgctctgcagaggatactgagatgagtaaggcacagtctctattccagggagttctagttaggtagaatagcatccaaacaaataattatgaaatagtttgatgctgtcacagaggcatggaccacatatagcagagccaaacctgttgcgtgatcagccccgtttgggggaaagagtggactctttccagcagaagagctatttgaaccaaggaccaaagtgtaaccaagagcctagcaagtagtcagtggccaggctggggaaccatattctaagcagaaggaatgacatttacaaagccattgacgttcaacaaatgcttgttgagctcgtgctttgtgtgttggtaagcttaaaattgagtcggggacagggtataaatatattagtaaactaatttattaagggtgattttgcatagtgagaaattctataaagaaaagaagagtcatgtaacacaaagttactgggaggacagctagcatttgcaggtatagtcaaggaatgcctctctcatgaggtgacaattgagacctaaataaggaaaccagccttgaagattcttggaggaaaaactacaggaagattccaaatgcaaagtccctgaagcagaaatgactttgactcgtttgaggattagagtggaggtcaatttggttggagttgtttgaatgactaggagaatggtaagcagagggcagagagtaggcagaagtcagatcatataaggcctataaaccaagggatggagtatggattttaatctaggtacagcatgaagccaatggagaaccaagcagaggagtggcgtgatctaattatgtttttaaaattcactttgggggttgggtggagaatatatttaagaagtgagaagaaagaaaaaagagggtcttgcagagagccagaaaaacatgatggcgatgtgagctagagtagtagaggccagaagcagaaccatacatttgggagactataagtgcttcttatggctgaatttttgcatattaaatatatagagggaagaagatagagattagtttggataacttggcagggcctaggttattaacgaatttttttaatggtatgaatattgaaatttattcttttggaaatatgaaaacattaaagtgtcttaaggagaaaaagaaagtacagaatgatcggatctggattttataacatcattcaggctgcactatggagaaggaactaagaggcagaacattggatccagggagtcctgacagaaaccctgtcatactggtgcctaagagaaacgttgagagtttcaagtaagggacacatggtaagcataaagtggaaaggttgggtttaaaataatataaaatcaatataggttggtgattcgttgggcaccaggcataagggaaaaataaagaatccacaatggcatctagtttttgttctattttcttttgtttgtttaacattagttattggggggttatgacacaattaaataagattaaacaaacaaacaaaaacctcagaaagagggtctggtttggggtggtgatatactgagtttgggatctctatgggatttctaagggatgatgtccactagccagtagatgaacaaggagaaatgatgcaaggctggaaatataggacctttatagatgtgggaaagagcttggaaacaagtaatcatggtggaaatggaacagagcatgaaggagtctagaggaagtctatccaggtaccaacatttgaagaatagctcacaaccacgtagaaataaaaagtattatgaggtcatgcactccatgaatatttttccaagaagctaggcaaggctggaaaacaagatggaccttaaaaggcattaattcagaaagtttgggcagcattggtcaaaagtaagaagaatctaggtacaaaacaaaaggttgtcatagattgatactgagtcaacaccttggcccagcctgaaagcttctggaagcagtacctcagcatgactaggccaggccctcccaggggactgaatgggagcaactggctagcagggagagtaaaggaatgaaaagagaggcagtttcagacagttctatttagatcaatatttttttttaaatgtgatctcaggaacacccaaagcagaattaccaggaatttctgttgaaaaacccaaattatgtatattcctgaatcatgcccagatctacccaatcaagatctctgggaatggggatatatctcctttgtaatcaagttatatatttagtactctctagaacctcctttgaatctgcccccaatttttaaagattcgttcaaaattctgattttttaaagtcaagtctcctggcacttggagcagctcacctttggggagtaaacaaggtagattaacacagcagtcagcttggtcagagcaagtctgctcaaaatagttactgaattcacacctaaaaaacaattgcgctagtaaaatccaaattttagatatcatttgatagaaaaagccaccgaggaaggctcagagaagtctgtctgtgcctactcacagctctgctactgggctggtaccgtgcctgtatcttgctcatgagttttcctctgcttttgtttgcatataaaaaaatcaatatatttatggtactaaatgtcgtctgtggcacctattaagtacataatacgtggtagctactattatttcttctttattctccttattatttccatttttttctcaggaaagttataaaattagaaagcaatttcttaaagaaatttctgaaattaaagtgttatacaaataataaatcatatttataatagaaactgtatttaaaaaatcctctttgctgtttattctctttctaagaagtataaacaaaagactgtacagatctgaaacatagctttcaaaagtgtatattaatttcaaaatgtattatttgttttaacatgtgaacagtggatgagtattcaaagcaagacctaggaggtaccagcacattccctaaagggtccctatgcccacataggagctgggtgaaaagagaggcacttatattcaaggatgctgaaatcaagatgggagaatgttgacagtgaaaggataatcggcagagggctgcagggatgatgcagttaatcaaacacatcaacttcataaattctgatctgtgctgagatcgctgtcccctgaagagaagtctaataataaacccaacctaatgtgccttccaggagccgtaatgtgcctctgtttaacagaaaatcagctaggaggatatttgcacttggattctgaaactgtgggaagagggggagacaaagtgaaaatccataaattggatgagttacgggctctcactggtgcatgaatgcaaaagaagcaggacgcgcatgagtagagcttgtgaatatttaatttgctcagttaaacctttttaactaaaaaaaattcagatctctcttttttagggggaggaggcattgtctaaacaaagcagataaaagaaaagcaatccctttagaattagagaggctctgtgacatattagtgaggtgactttcccactgtcatgtccccatcatctagcacaggggtcagtatccccaggtcaattctggtctgctgcctgcttttgtaaataaagttttattggcatacaaccactctcattcttttacatatttcctctggctgctttcacactacaactgcaaagttgagtagttacaaaagagacagtatgatttgcaaagcttaaaatatttactctctggcatttcacagtaaaagttttctgaccctgatctgtatacagcctattagagagtaggaattcagtaactctttaatggacttgaaatgtgtactagctatatacctagggtaaactgattaatctccctgagactcagttttcctcaatgctaaaatgggcataatgataccaatcttacaaaatctttgcatattctatcatagtgtttagaatgtggtttatggataaaatgcagtatttcattcttcctgcttctcccttcacttaatggtagcaggtgctacagctgtagtctagaataggcagtggtgtgctaactgctgattttatggctgtctaaattttcagacatacagaaacagtttactctcccaaatgagtcagtggtttatagtaacttatgactgtcctgaatcaagaatcatcttttcttctctcttcactggtcttctttttttccctctcctttttagctgaatgtttgttttcctttaaatcaagtaagtccttttttatttttatattcaccacagggaatctaattcattccatttctcctgaaagacataatatcataagagcctctgctgtctgggtgccttactgttgaagcagtagaagtgataccaaacctcttaatctcaagtttgatggacaataagccaatcacagtggtgcttggagatggagaaaggtttattcaaattggccaaagcaagaaggcaggaggatagattctctcaaatcctccttaactaaataagaaatcaggtttttttttttttataaagctaaggggcttgggaggtggagatttggagaaacacatgagaagtctgtgatcctttcactccagataagcccttgggcaaccagactcctgggtgtcagtggcagctgggagctcattatctggtggttgtaacttccttaaaggcatttcttttccctctgcaaaacaagcttataaatccttgtcacccctgattcacctctcaggttaaacatgaaaacagcaaattgacaagattaacttctttccatctgtgtctatgttgggaacaaggtcaaagggtaatcatgtgcttattgaatattctcagttaccttcaggtacagggctttagaagtctcacaagagtatttgttttagaaaactccttcaaccttttatttttggtcacccccaatctatgctgagaaaggaaactctaattggatgcttacaataaacccagacagagctccaaatgaggggtggttaagaaggaccaatcaaaagagaagtctttctgatgctttgtaaaagcctatggactgaagggaagtgctctttgatggcaaggtttgttcatgtggccctcacctcagctttgtgaaagaagcctggctttcatcctgcgctagctcatcttgaagcagtccctcttcctagaaagttgcactaaggcattcatgagcaatgttttatcaaagttattgtaggtgggatagctttacattcacccccacatcatgtttcactcgacaaagcctcattagacacttcttttcttctcagactcctgagcccgtgtcccacaggctcccctgtcactagaacctttcctctcccacagtctctccattcctcagctgctgtttcctactccccaatctgcctggaactcaattgttctccatttcttctttaaaatatcttagtcctttctcagctgtagctccatatctgatacctctagtacctctttaaggtactatccagtacctcttcagtactgtcttaagtaagaattttttgagggggaagatgcagtttttgctaagcaaacaaaagaccatcactgattaggccccttctttccagcacagtaattcagagttataaatagcagcaatagcaaaagctttgttcttctttcctggctcaaagccaggtggaggcagctttgttttgtttttttctttttttttgttgtttttatttttttcttcccagaggggtggatgggctgggaggatttcaaaacgttgcacacataatttgatatggctctgactttagcaccatttgagttaaatgaggtaatctttatcccaagaaaacagggcaacttctaaaagtgccaatagaataaaaatcaattttaacagttgtcaccatttactgagtgaatagatttcttgtgttatatatctgaagggtgaataaaattgcttttgaaaggcaattatggtttatttaaatatttgcccattagaataaatccaaacacttggaaaattttagggtaaaattgtaaaatgtaaatatgaattgaattagtatgatggttgactgatttacagtgtgacaaactaatgtaccttcatttgaaactctgtgaaggatagactgtagtgttaaacaatgagcagagactgagttaacaattaggaaagctgggtcatgaaacaacgtatcagtagtaccaaaagacagactctagctatcttctaacaaaatgttatatttggggatttattgagccagcaatctggggtccctccttcgtgcttcagcccaagatgctctggaaagcagatgtcaagtggcccctgaagctgctctcttgcattccagatgggctcctgaggattctgttattgactacctgggacaagattgagattcatcactgaacacagtggtcagcacacagtaggttctccataaatgttttttgaggaaaaaggtaacacaaatactccaaatgggaaccttgagacagtctacttccaatcagtgtttgtgcaattgcacacatttttttttttatcacattgttgttaaagtcatgaaccttggggcagacccatggcccagtggttaagttcgcgtgctccgctgtggtggcccagggtttcacgagttcagatcctgggtgcggacatggcaccaatcatcaggccatgctgaggtggcgtcccacatacatagcacaacaagaggtgcccacaactaatatacaactatgtacggggtggagggctttgacgagaagaaacaacaacaacaacaaaagattggcagcagatgttagctcaggtgccaatcttaaaaaaaaaaagaagccctgaaccttggagccaaatggaaaccttgagacagtctacttccagtcagtgtttgtgcaattacacacatttttttttattgtgttgttgtcaaaatcatgaaccttggagccagtcaaactaggtttaattcccagatctaacatatttagttatatatttgtgagcaagttgattaaatgcttgtgcctcaatttacacatctgtaaagtgggaataattatagtacctacttctttggattgttgtaaggatgaaaagagatgatatgctgtaatacttaaatagttctgggcccatggtgagatttgcatagatgttgttagtatttcctgtgttctctaacccacagtatgaatgtattaggcggaagaggataggccatactgctccccaaattaaccctgaagtttcgattcttgaaaacaccaaaggttcgattcctttttgtggcccatatctgccactggtcattgaggagctgaattccacacaatcacctgtcaaccaggcttttgagcccttccccattttgaaacaacacaatttagaacatatggcttcttcggtgatctagacaagaaagagtttgctggaaagtcttgcaccagcatttaaatactttggtctggaaatgacagaccttacttccactcccagctggatggccagagttagttgcatgacacacccccttggttgtaaaggataatctaattaatcttcagtgagcaaagtggtcactgtcattgctccattgaggaaactcccttatgttatttgtatctaacttcatttctggtctttttataaccttatcttattcatctttatatctcccacaagcccgaaatactgttcacgataggtgctcgataaatgtgtgcgaaagaaaggaggaaggaagaaaggaaagagccatgttttatttttgagaaatcagcagttggagggacgtacacgcaacagtcagaaaattgaaaaataaaataaacaacaacaaaaactctgggccttacaaaagagttaattgattttaaaaaatgatttcactttacctaaacagaacactcggagactggatattgttaacacatttgatagacttgactcaggaataaatctgttgcgtaaaccagcatctttgagcagaagagaggagcaatggtatttttttctgtaattgaagctgaagttcctcctctgaatattcattactttcagattaatgttgtgttatttctctttctgttcttgttcaatttaccttgactctttgttccataaatggactacccttcaaagcctaaaattgtctcacaccaaaagcctgaattagacattattcttactcttctcttcttacttctgaaaaagaagatgagtagagaggtagcgataggaagaattaagcagggattgaaatactggtccaatatcaatctcagatatgttagctgcattcacatctcttacacaaaaactgaaatctattccaagttgcaacttaatcaaaacaaaattttttggattctagaattcctaatgctaccttatcttgtccccacttacttacttgtaaacttaaaaaactaccatgtagttggtggaactcttattatccagtggagagtagatggagggagaaaaggaaattaagagttataagctctactctatacaatatagtgcataaaggcagtttagcgtatcgggaaaaatcttctagatctagattatctggtttcatattccaactttcttgcttattagccatgttaccttgtgcagtttgcttaatctctttctgcctcagtttgtttctctctgaaatagggggaacactcttacctaccttcaagggttaagtgactggtaaatgagttatgatatataaagtgctttcgcagtttctggcatatagttagtgctcagtaagtgtttgttatcattactggacacttacctaagttgtttacatgggttatcacattttatcccagattttggaggttaggcattttactcgaggtcatacagaaaggcaaatgtggctggcagaattgaaacccaacattcatttcaaacccttggcgctttatggtctaccaggatccctgattctaatgagaagggcaggaaggaagtcaggaatattgatttctaggaccttcattttatcttttgataaactttattttgtagagcagatttaggttgacagcaaaattggggggaaggtattgagatttctcttatatcctcttgcctcacacaggcgcaacttctggcactatcaacatcccacatcatagtggtccatttgttacaattgatgagcctgcagtaacacatcataatcacccaaagtccataatttacattacacttcactcttgacattgtacattctatggatttggacaaatgtataatggcatgtatccatcattgtagtatcaaacagtgtattttcagtgccctaaaaatcctctgtgttccatctattcatacctccaaccctccaccaccaacccctgacaatcactgatcttttcactgtctccatagttttgccttttctagagtgttatatagttggaatcacagttagtaatcttttcagcttggcttctttcacttagtaatatgcatttgaggtttcttcatgtcttttcatggtttttaactcccattgtctggatgtaccacagtttatttatccattcacctactgaagggcatcttgcttgcttccagatttgggcagctatgactaaggctgctataaacgtccaagtacaggtttttgtgtagacttaagttttcaatttactggatcatatggtaagagtaaatgtagttttgttagagactgccaacctgtcttccaaagtgactataccatttggcattcccaccagcaatgaatgtgagttcctgttgctccacatccttgctaatatttggtgttgaagttttttggattttggctgtgaattgatgtgtagtgatatctcatttttgttttaattagtaattccctaatgacatatgatgtggaacatcttttcatacactcatttgcccttcattatctttaaattctacttccaaatctttgtggagactatcttttgagggatagtgcacatttgtttttggcttcctagcatttatttactttccttttgtgacagtactacgaaaactttcttggggtaaccatcccttctaaactctcagactctaagttgcagatagaattggttttgtcccttcccttattccaggagtgagcaaagaagtgaggcctagccaatcagaggattgcatcctctggtcacaatgatggcatcagggttaggcacttgacttgaagagccaatgacgtacaatgaaatttacattgatgttgtcagaaaacaacaggttctctttcgtgctgaagttaaactgggagaattaaggttacagtacctacagtcaacttgcgaccaagaggtgaaagggagaaaatagttggagctcttttattctacctatagcattctgacaagtttattgagtggtttatgatactttgactgtcactatttccttgattcttaccttttgtttacaagccagtcttcccatcaagccaatgtactatacaaagtccaaccaatcattttcttttctgtttaaggggccagtctatttctatggtgtgccactaaagacatctgataaaacacacgtaaaattgcacgtttcaacttgtgtctattttagagaactagtattccagaagaaacctgacagttgccacacttactgaatagaaaaatattcagtgtagagatcttgatcagaaaaaaatgaactccaatttctcctttactatagagatatttgtctgcatgtaaactcattttattccagttgccaaattggtgaggtagtcttaaaaatggtaagcctgaaggagatagctaatgagtgtttcatcagtacgatattagacaaaagcaagaatcgttgttaataccataattgttgagactgtgaaaaaatgtccttagtttaaaacgtttttaacatgaactgttgcagaaggcactcatctgggcagtttcctccaggatattctcttggctgagaagcaacaagccttgctgaggatggaggagacagacagttctcatttcattaggtatttatgcaatgattatcatggtagcagccaactcattacagaacagggcatatcaaattattctgagccaatgaggctccagtggcaagacactccaaggagaaattaggagtagagaaagaacttttagatgagatcatttattgttactctgagaaagaaggaagccaagaagtaccttttcatcttcccccaaactcaacctgtaccccatctaagttccccaaagattctttatgcccctgtcatatgaggtgaaggaaagagaaaagtgagtccttctttcttaagagtaaaaaatgtgccaagtatatgggatataggatacttagcagaaaatgaaatattgacatagtgatcatggtgatactggataccaagattctgcccatatgtccctttggacccagtattctcacagtttccaagggcacagattcaccatttccattgcaacttcctttcagtcaaagaaaatctcatggcttttgaaacatagttcatgccaaggccctttgtgattagtgattaagtcagagtattaaggatatatagtatttaccttgccaaattggccctcttcctttcatatatcaggttagtgattcccaacactagccacccattagaagtggtttaccgccagaatgtgggtattgttttaaaagtttcccgggcgattgtagtagcatccaacattgagcaccgctaatctataggcactatacttctagcactagtccagatttttaaacatttactgttaatttactgattcatttgcaaggttatcagtacaattattacattattggaaattttttacagctatgatttatgctttaatcaaaatcaggatgatggcttatcactcaatggctgagctcagggaaacacatcagccacatggtgggttcatgatcaaattcaaccttattctgaacctgtacctgtagtatacacactgagagatatgctgccatgggagctttatagctaaagctctgtggaatgcttaagtttgaatgttattggtaacaaaattcttttaattaaactgaggccttgatgtgtgtgtgtatatatgtatatatatatatatttatttatttatttatttatttatttatttatttatttttcttaaaatagtaaacccatccataaatgagagcttacttcataagttagagctgggggcgcaaaaacaaatttggaaatgagaaagtaatgaagacctagatgtgaatgtaattcagcaaggagccagaagactataaattgtttcgcatttatgaggaactgtcaactagaccaatctgtaaatttagaaaccgtttaaaaagcacaaagttgtagtgtgggcaaaaatgccttgaagaattttgaagtgtattagtgagagcagtccacttgttataatattgtcttgccctagggacgtttggaattgtgcatttttgctctactgcaccagaaactcaagtgagataaaaagagaccaggtgtaatcacaggcctgtgacctgaggcattttcaagcccaaaccttcataaaatgtagggatgtctttcataacatttgaaaagtagcctaccaatctctgaatagaagagaggagaaagaactccaaccagatctgacctcatgcaccccagtcatgtgagacaaacaaagaattctgttttccctctaatatttgcatatttatgatgttctataattataaattattttatgtgaatgaggtcccaatttctaaataaatgctaagcagcatgagaggagaaaaggtacactctctcactctcattactctcctttcctcttctccacataattggtacccataatcacaattgacatgcctttcaattctgttgatggtttgttcttatgtgcagaaattttatatttttatgcagacatttctattgatttttttaatctcttatgatttgttccattacttttaggcttaggcagcatttttccttcttgagaccaaattaaatattcacccatattttgctctgattgattgattgattgattgcattttactctccctctgcctcctccttctgtattttcacatcctctccattacaatttcttatgctcgtttgcatttactaaaacctcactccatgccaagtattgccctcagcattttgcatgttatatagtctacgcaccaaccctgcaggttgatacttttattgttctcataacggttaagccttgctcaagatcatgaagtcattaatcatgttttccaacccaaagcctttgctcataatcattatgttatctttccttgtttatggttgttgttggttgaattatcttgcaatcttgactgatcgctcattttaaaaatattgaattgtttatttccacatctctaaaatagtatcataacatcccaacacgtggtatagctctaaggattccatgaggcagtacacaaagtgcagaacacagcttcattcacacaacaaatataactgcctttcattcttgacattgttcctgttgaattaccttattttattattttgtatgtgtgtgaggaagattggctctgagctaacatctgtgccaaacttcctcaattttatgtgggatgccaccatagcatggcttgacaagaggtgctaggtccacgcctgggatccaaacctgcgaacccaggagtgctgaactcaaccactatgccaccaggtgagccactgcgttactttagattgcaagaaacttagtatcatgtcttttaatttacttgtgttgttttcttttcagctagtctacaagcctcatttcctatcctcaatctgaacacacacatataggccccaagttagcacccattgctgggtggtagatttttaaaagttattttgaacacaaatgcctcttattgtaccttcagagcagtagaaacaaattcttcgggtagaaaggacagccacagtgatggctcactcagtgacaattccttgggttatttctctttttgttgacatggcattagtgttgctatggaagaagatttttcaaaatctccatgactaggagaattggacaaatttctctgtttcaggtcttggcatatttccacttaagggagtgagtctgtcttgatgtgtcaagaaaataggcttggaaacttgtaccagctggttcaagtgtgttatggtgcagtggggagagtgggaaatatgacctggcatggagattggtgcaaaagctttggtgtttatagataacagcaggggaggatgtaaagaatcctttcacgagaatgaggttagctgtgtttgtgccagggcttgagaccatagggaaggttggcacagacagcaacctctgaatcaagaattcgaattagggccatgaaaggaatgggacactgacaggttgtcagcacatgagctcagtgccaagaccccaaaaccactggaggctccccctttatcttttccctttgaaagataataagtgcatcacatttttaattcctgcaattttaaggtaaagttaactagtatgggcatccaaccaagaagtagctgcataagttaaaaattccattcttgattttacagttctgatgtgtttacacactctcttctttgccctagtacctacagagtagcaggacatttgttttcactttctacaaataacaaattatttaaattagaagatgaatatatgcagtgcagcattttagaggaggtaaaggaagttggaaagtggctggacatcgttcctcagaactcttggaagattataatatgggaatttcaataaactctttctcttcatctcatttcaatggatgtcccatgccaccatgaaattgtcactttgaagagaaatggagagggtccctaaccacggattgctgtttcttccctccccatcccaaacatccccaaatttttcttatgtgtttgccagctctttcaataatttctttctttctgaatccctaaacagaaatgaaaattattaattgggcctgcatgtttgctttgttagacgaattataattacacctttttcgatgagatagaagattgaagatgcagctttgttagaagcgtgtgccttgtaatgaagatcagttcagggctgaagttggtttcaggaattcctggagtaccagcagccctgagtgaaattcttgagagctccatttaaatacctaagctcttctttttgcctaatagtgattatcaacactaacaaagctacctgggcctttaaaacgccaatcaatcattatctccctgttgtctaaggaaaactagcgagaataaaatgagaaattaaagacaaatcaaagtgttttatggtagaatatttctaagtacgcggccacagtggttgtgaagtgaacaatattcagtggaataatggggtactccttttcctttattggactactggttctatttatgtagcttaaaaagttatgagtcgattctgaggtaaggatggaggccagttttgtctataagggtaccctactgataggagagtacaaacatgtatggtacctttctctacataataataaactaataacatttgatatgcctggaacgcagcaatgacctattagaattatttattagcggaattcgaaagatatgtcatcatataacaaggttattttgaatttatgtctctgtatcacgcaaattaagtatatggtcaaataaaatctctaaactttttctttcttttcctccctcccttcattccttcttttctttcttctttccctccttccttgatatggaacagttgccaacagggccagcttcatgggtgtgcagcctgtgcccatacttagaggaacaccacacttagtttaatgctttgctgtcactgtcttgaaattattaatactgttttaaacaaaagactctgcaatttcattttgtactgggcctagcgagttgtgtagctattcctgcttaccgattcaagtctctgccgtcctattcaccaacaattggtctcttgatagccattccttgttcctttcctccctccccacctgtcaccaaaaacacttcagaatagggcttcctcgctttccagcgagggtgagtgagacgctggctgtctaacctgactccactcacttttcctttaattcatttggcaatgggaccctacaaaacccttaatatacctttttcatggcatcacttccacactgacaaaatcttgacaatatcagctctaaattttgcctaatctgcaaacagtaatctgttctcaccttctgattaatcctttcttacttcctcctgctccctcaagttttatttctaatctatatagcagtatatatatattatatatatatatatattatatatatatcacttcaccaaatcatgagtataaaatgtcttatattttttagcatctttaggaaatcgattcattaatttaatccttcagctatttaataaatatttacccaacatgtgctttttgataagtgccctgccagtcagccagtcatggcagcaatgcaagagaacaaaacatacttgccccctaccctcatgtaatttacatcttggagggggatagagatactgaataagtaattactacttgttaaggatatcatgaagcaaaataattaggaattatgggaggcaattaaagagagcataatttgccttgtgtcctctgactagtcaaacctcatacatagttcaaatcctagataaaaggctccttcttacacgtagcttcttgttacttatctcccttgcttacagtatttacagtctgcttatccaattcaaccttttttcattaatattttatttcttgtttcctcaattagattgtggtctagactatgtctcatgtgatttttgtccttccagactcagctcagctattaccttctctggaacccttgcctaactgccttttcctcccaaccctgaaagcatatgtatttccatatgttatgcatcagttttattggagactatcttttatctctattgtcagtgctcagcatggcacaagacttgtagaaggagatgctcaacagcttctgaatggatgacgaaatgattcattctaagttggctatgtttccgaatttaaacgttgaggagtattccaagttatgactgcagagaagtttattactaattacaaatactaaaatatacaaacaaaaagcaggaattctcatataagcagaaaacctcattatagcctaggtatctgacaatatttcctagagacacagtagatttcgatggcaattattgcataatgtgtttttattatttctttcattaccagttaattgttttagagtaccttccatgttctctgagcggaccactcctccaaaatctccacacattcaccaactcagaagctctctgaaccccagcctttagggtttttatggagatttccttacttagtgatgattgatcaaagcagtggtcattgatgactgaatcaacttccaggccctcttccaccgccccaggtcggggaggtgggactgaaagtggcagccctctaaccctgcggttggctcttgtggcagccagcccccatccttaggtgcagcccacaagcaacctctttaacataacgaaagatgtttgccgctctcgtcgtttacaaaatttcaagggttttaggagctgtgtgccagtaacagggacaaagaccaaatatatatttattataagtcacaatatcacagtgggtaataatttcaacctgagaacaaggataattttattgataagtgaataccgtttgactcctggctggtgagaataagtgcagcttttgctttttgttgtaaatattgaggctaaccatacctggtgggaacaactactttaaaataatgaggctgcgacttgatggcttgtatcaattagaaaatagcttgagttctgaataccacatacataaatgatggttagactcttttctttcccatagtaagaaagaatccaaagattattttaatatcaggagaactatatttttataagtggacttggaagctaaatatattttctctccaattatagagaaatattaatacaatgactagtgctttaggctccatattatcagttttgttgctccttctatttctaagagtctccaataagttgattagtatcaaaggggagatcttgtatcttgaagcttttctctttggtggtcctttaattagttcctgtcacaccttcttttgacttttttttcttagctcgctatcagttctaggatctcagtgctgttcctaacacttgtctccttcatactcacccaaagagagaccctgagagaggccttggcatggaatgttttacgcatatggattttggaactctgcttcacctcttttaatcatttattgaatcaacacttattttctgagcacttataatgagccagacactggatatatagaaataaataaaatccaccatccctcttctcgcggaacataaagtctaaaactgaataaagtctttaaataaataattatacagataaatattaacaattggaaacatgctaccaatgaaactaaggatgctgctagaataggtcaagttcttaatttccccatttgggcccatcgtttatacaatggaaacaatgatacttacctcactgctgagaaaattaaatgacacaatgtgggtgagtgcttacacccacaaatgtattacaaatgtgcattgtctttaatcaatgctattattacagtagtcgccctcttacccacggtttcattttctgtagtttcagttacctgtggtcaactgcggtccaaaaatattaaatggaaaattcagaagtaaacaagtcatatgttttaaattagaccccattctgagtagcatgaggaaaatctcgtgttgtcccgctccatcctgcccagaatgtaaatcatccttttgtccagtggatccatgccacatacactacccaccttttagtcacttagtagccctctcggtatcagatcgactgtctggtagcgcagtgcttgtgttcaggtaacccagatgttacttaagaatgaccccaaagcaaaaagtgctgctggcaatgtcaataagaaaatgcattttttcttcttcaccaaaaggctggaggccctctttttaggtaaatgttaattttatcaatgaatattcattagtaatcattcaattggtaactgatttaatcataatcattgtccactgcagtctttcagactgacaattattactcatatttctttcttatgtttctctattccattatctcaaatttttgctttccctgtaacgccctcatttcataaaagtaatagtcaataaattaagcttattggaagttctttttatgatttctgaaataatggactttatacattaatacttttattttatattcaagagcagttgtttttatgggaaatgtttcctgtaatatatgtgtactgaggagttttcaagcatattttctacttttgctggacaacctctcagcattgtgtttaaagagcaaagaagcagcttcggatctgccaggatcgttggttcttattgttataatacagtgaaatagattgcaattctttttctttgtttcaacttcatttcaattgtataaatggtatttattttataaaagcaatttatgtcttgatagtaaacttttaaaagaaaaatttgttttataaataattagaataaggtaagaaagccctgattattccattcattcagtgaaatccagtgggtaggatctggggatctgaagctagagtttctggggcaggtcttcactaacttggggtgacagcattagccgatgctctcagagtgccagtttcctcacctctcagaaagaatggagataagaatatcaccttgcagcattatcatgaaaaatctgtcaattaatatttgcagaatacttagccagtgcctggtacatagtaagctctcagggcatgtttgctgtgactgttgtatattccaggaatattcttgaggcacctatgtttgccaagtcctgtgctaagtgtaacgattttctatgttaagctcttgttcaacagctattcctgcctttgagccatttgccttctctagcctggtttgttttcttcttaaaaatgaaataaaatgaaactcagtcaatcataggaaatggtcaggcttgcttggagaaggtaatacatcttgctcttccacaaaagttcaaaccccttcaatttactacttcatttttccttcaaatccctacctctctctctcatcactatcaatctttctttttcttttgttccttccaacttgttataccagcagtgaagtgtagtggagagaaatcacgctttgaaagctgacagacctagaattgaatctagaatttgcctctcaatagttatgtgacctgaagcaaggcacaatctccaagtttgagccttgctctctctaagttggttattttgaagatcactaatattggtaggtactcaataaatgttatttattattaattcaggcaatgtactgtctaaattatccaaattttcacttaatcatatcctgcattgtcattttactagaatctcttagtgtatgtatattgatttggattttaaatttcttgaaggcagattctattatggcatgtaaattcttcatgactagagcaattttgggtgaatgcatggtataattcagtttgacatgagtagccctctatgaattaaacaaaatttaaaacctgattatatcttccataattgattttattttttaaaggggaacaagccttttaggcctaagatctaagcatcctaggaggaaaactaagctcatttaagtttattctcactaaagtataagtggaatgggggagaagaaaataaaaatgagagaaatgatttaccctccaactgcccactaaccatgggctaggcagatttctgagcagtaaagtattgtttacttgtttgtataaatcatataccaatatcattcattataatctaatgagtgccagctatttgccaggcatcagggagaccatggtgataagaggatcagtgagacatattttgtgtttgtaaatggacaaattcaggaaaagaatagaaatttaaccccacaaagacagtcttacaatgagatatttctaaagagtcctcattcaataaactagttttgattgtctctacgtgtaaggaactcttcagtgtcatgacagcacaacctccatttcttttgagcttattaagtcaaatcgtctattcattctatttcttcttcatttcttctctgcttagaactcagaagaaataagtaaaataaaagcatttttataatggactttgttcagtttcagccatgaacatctatcctttaaacataaattcatattaaaattgcaataaaataatacatcataattttaaatgttgatgttgagaggtttttcttagtataatttattttatagaaggtcaagtatataatcctgatattgtaccaagttgctagcatctaggacttgtttatgactctcacccttaatagctactggttgttgaccacgtattgtatgtcaagtcccggtataactgttacatatataatgtcttatgtaagcatcaattgcatcctatgaagtagatattattctcttgattttacccatggtgatactgaggcacagaaagcctaagtaatttccaaaagtcacaaagctagaaaatagttgagttgacatttgaactcagactgcttttttttgaggaagattggccctgatctaatatttgtgccaatcttcctctatttcatgtgggatgccaccacagcgtggctcaacaaattgtgctagatccatgcccaggatctgaacacacaaaccccaggccactgtagcacgtgaatttaactgctacaccactgggccggcccctgaactcagactttttaacctcaaatttatcaaatcctaaaatccttggtttttaactctgctgtaaagtcttagagtgaacatgcttataaattgttcacaatgctggatttgtagactcagtttttaaagatgatggctatgcattaaattcacttttgattgttccaagggcatttcttcttcaaaggggaatatcttcaaaggggaaaagaaaaaaccacaagcatgtacatgagtctgattttgccgttgagttctttcttactagttagaattagttacagatatttagttaagggtctaatttaggacaattcctagtgttgtaagtaaccctcaaagttattctgatttctctgaaattacagagaagaaaagacaatgaggatctttgaaactaggagtactgtgatctaaggagggatgcactcatcaattttaacatattttatcctccttcttcccatccttccccaaagactactctcattgtgcttgagtgactatctgaatgtaaaatggagacttctcacttatctcggggcgttgtatttttataccagatgctctgtttgcattcttttatcatatgttcatggtttataaacaaggtagatgcatggatttgtgttggaagtatttacctttgaaaatatgtctctgtagagacatattttcatccaacaaattgaaaatcactattgtataatatttacacaaaaatttcaggcaaaagaaatttttaaacttctattttgtgctgttcttggtgcataatatattcaacaatgattaaatgatattcatttttctgtaggggtggagtggggagagccatgatatgttaatgttaccttttgaagtctaaattatatacatttccattaatgaaccagtaaatttaggttataagatcaccaactgatacaatctccaaaaaaggagacaaaatacatggttttcacttctggtttactggttcatgaacataaagtgaccaaggctactgggtgtatgggtagtagaactctaaaagttgggtgttatcttgtctttctcagatgtttttgactaccatctagtaagaaaatatattttacgttataatgcagcgtatatacacacacacgcagacacactaactgtaaaatgaggtttcaaaaataatctttacctttactgtgtgtgatgtactctgatagtgtctggtttattccattccattccattctattctttcttcttttatttttaagtctgatcctgactcatcattaaattgattttatgacccattagtggatcctgacctagagtttgaaaatcactatctgtaaatagtgagtaatcgtaagaggtgcgtaaacaagagaatgacatgatcacaaaagcttggctgagtgtttaggatggacagactgaaggaggcagttccccaagagagatgatgagggtcggaaccaaccaatccaagtaataatggaagtcaatatttattgaacaatttctttttgaaggtcttatggaaacttagctttgagtgcattctatcatttcagtcctttaacaactgtgtatatgtaatagttattatttattatccctgtttgacagatgtaagaactgaggctttgaaaacacttttctcaagttcatatagcctgtaactggcaaatttgaacccacatttatatgactagcgcccaagctctcatccattccattcctgtctcctttccccatcaaaaatattttgtcttttattgtgcaaaggtcagtacattttgttatggatcaacaacatgcatccgaagaaatgtctgcagtctcttccagatttctcaggagagggggtcatggaatttttctaacaagaaggagattttgaatttagaattgtgaattatttaaattgtcaattcccttgaaaatcacaaaataaagctcctgcaggtctattattatgccatttctctaccaagatgcttgttttcatttgtttagaaatgtaatggtgtttcacataaacatttcagaaacagatattattttctctgcagttctatacttaatgtcatcgtgcagggtgacagagtgcaatgcagaaaataaaataaattgaacgtgcaatagaggtgataaatttagctcaggttgagtgttagttctcatggataaactctcagcacactcggagaactttgtcatttgctctctgagtgggctgatatgtccttacaaaagcacaaatgttaccagctgccttttctctctcattcatcactgtgatgctcaggaaaggaatgcacattctctataccacatctttgatggcttctcctgacaatgtagaaagtacttgttgacacagtggctgaattgattttctagaggaaagaaaggcaggttgggagttcaccatgcttaatgtaataatactttttaaatatgtacttgacaattgtaagatagcaagtttgggagaacactgagaaagatcccctttaagcatttgtttactttgcatgaaatgttttacataatcacatagaggacactgtctattccatgccactcaagggtaaatataatttttattcaataatacttattagtttacctataaaaaaataagttccagataataaggcataatctcatcaaggcatagttcttcatttcataggaaactgctttgtaaaactattttgaacaaaactttattatacaaagaaggctggttttagaacaagtcatacctagagttaaatgtagtatctgtcacctgttaatggtgtaaccttgaacaagatgttcaaactttctgagctgaagtgtctttatgtgcaacatagggctgtaatacttaaaggcactgctgtggatattaagtgagataaataaagcctaaaatagtgcctggctcaaggtcaaggctccataaagattcgttcctttttctttccaaacattgtgaactcatatattgagaactcctgtacttttaaagttacccagataaaattccgtggtaaatagacattgccactttaccacacaaataaagatattttatgacagcatagatttgggaaatagttgttataattggaagtgacacatttagttgtagttgggatcagttgataattcttgtggtaaaacataatggatatcaatttatctaagagttcctgtatcaaaagctgtgagctctattggatagtgtccaagttaagtaaaaaaaattatttttcaaaagtaattttcagtgtgttatatattcttgttctgctacatgagtcaggatagatggaaacatttagttaaattaagtttttatctctatgctgaaaggcagtttatggagaataataactagaatgtcattgtattcaacatgtactgaattatccattgactttgaaaatataagagtatcaatagaatttgccctcaatattgtacaagggttttcggcaaagaaaaacggggtggttgaagggagttgatcctagtgggtaaatacatctggaattctgaatgtgaagttaagataaaaataatcataggggcataaacaaatacatgaatatatataattcaattaaaataaattaataggctgcatagcaaacaatttattaataagatataaataaataagcttgtcaatatttaacatggcacaagggaatctgaataggagcaaggcatgtaaaggatgcaaatgatattcttaatttatttttcttgcatgaaagaaatttaaggtgtcaacttttctccaaagcagttttctttctttcggacatgtttgcaggcttatcgtatgcttgtgctatattcagaaagcactgtggctttaagactgtttttctgcattatcagaaaatacaggacacagtgttctgccttattgctgatgtgaccttggcttatggtatgcctagggaagccatcctaagcaacaatgcagagcactggactttcatgcttcataggtttccacttcataaaagatattttatatgaaacagccttaaatcagttgatccgttagaatctctgatggaggactgtttaagttggagaaggaagaaacactaaaaaatgtaggcttctatgagcagaaacaaatgttgacgagcactagcatttatttattgattcagtcagtcattctagagatatttattgagcacctgcagtatgcgaaacagtaggattctcaagtcaatggcgaggtaaacatactttaagaaggtgcaacattacagatagagggactgcctctgaatcattccagcttaggatgtatcacctccatgctggaaaaagaccaccattcctttggttgagtatgagaagaagtcattggcttgtccacaggtgccaagaggtgaaaaaaaaaaaaaggaagaaagaaaagaaaagaaatgcacgtgttgaaaacctagaattatactcaagactggaagatgctcacattctgtgaggtccaagaagttaagatgacataggccagcagcagagtcacctccctttctcatgctcactcactcttggtcattcacctgttgagtagaatggtgggttgaagaatgtgccatatttaaatcctttcttcttgatctcttaccttctgcctctctctttctcttaaccctccttgactccctccctcaatcgtatatatttggaaacaagcaaatatttgttggtttgcttgtttatttacctgagtatataaagattctgggctttagaagcagacagaccttgggtagaacacagtggaattcatctttagccagcatgaactctaagacactatccattagctagtctgaacaaatacgttaacttttcttgcctttgaaatgtgataacaatattaaagttgtgggttttgtggaaaaattctcaagaatatgcataaacgtttagtgtttggcattgagtgggcactggtcaatggagataaacagattgcagcatagcatgatagaagccaggacaggcaaaaagggtaatacgaagaaaagagtgataaattcttccatgaaaggtatcttctgaacagtttccaaagatagaaaggagctgaataggtagtcaaggcaagtaatggcagccgtggcagaggaggaagtcctgtgcgaagtctcatgtattagacacactagggaatagagtgcatttatggaactccaattctaaaagtaataggaagcagaggagttaaacaagaccagatcatgaagggtcttgaaatctgcacatgcttcaaaagttggcatttgagagagattactattagtctccttgttagagtcaagggttttccagacatggcaaactgcctggactgaagtcccagggtagcatccagcaaggcaaattcaagacagaacaagcaaacttctttgagctaacgagggttgttagtgcataatgcaagttatgactagaaggataagtcgacattagtttatagggtagaatttatgcaactaaagaaaaataggcaaaatcacagtgagggtgcagctgattgattttttaatgaagttaaccataaaactaatgttttagggaaaaaagtatgctcaagaaataaattctattaccattatcaaaatcattaaatgataatggagtaatcgtaaagtaaaaataaagtacaatagtattttaattaacctaattaagtctcagtggttaaaactttaagtgtttcaatttagtataatctctaaagaaattagcatattaatgtaagataattataatcatagcacttcaaatgttatgaattcaagggctagagaaaaatgtgttaaggaaagtaataattccgtaaaatgaataatcacaattaaataactttgaagtcttctaaaaattttaaaattttgataaatgactaatcagagacttataattcacctctgagatgtatttccagaaatggctttcggcagcacttcaaataattctgagtgcattaagcaattttaccactttggtttttagtcagtgtggaagccaaagtctaatgtttctactttggtctccaaaattttaaggatttggggttattttcagccagaggaaatccataacctaacagaataggccagtttctgtgagaaacaaactaaaaaatttcagtagtttaatcaaatagtttattttcttgcttgtctagaccaaaagtatacccaagtacaaagctctcctgtgagtggtgactcaggggcccaagctccttctagcttgtggctctaccatcttcaataagtgattgtcaaggccagtctagaggtcattgctttggaagagcacatgcaggagatttttatgagcctgtctgaaagtggcatatgtcatatctgctcagattcccttaaccggaattcagtaatgtggccactccaagaagtctgtaaatgtgctctagccccatgcaaagaaggaaagaagaaggaagaagagaaaagagtggtgtagagccggcccttgccagctattcattctgaagaaggaaaggaactcaagtgcgtggaacctacatgtgccaggcggggctgataggcatgttcactcacgtttcttcattgagtcttcactacagacttacaaagtgggcatcacccaaagaaatggttttcagcacttatttcaacatttaaaaacaagaatccagtttgaggtccaccagatcacttcatcttgagctgtagtagtagcacgggctccacagccaacagccatgatttggaaccccagctctgctgttcaccagttgtgtgaacctgagtatattacttaacttatctaagttttgatattctcattgacaaacttagaatattcattttcaatttttcctggcatagactaagtgctcaataattgacaactagcatttatccttttcttttaaaatcttataatttggtgctggcccagtggtgcagtggttaagttcgcacgttccacttccgtggcccggggttcgccagttcggatgccgggtgcggacatggcaccgcttagcaagccatgctgtgatggcatcccacatatgaagtagaggaagatgggcatggatgttaatgcagggccagtcttcctcagcaaagagaggaggattggcagcagttagctcagggctaatcttcgtccaaaaagaaaaaaaaagttagaaaaaaaatcttataacttgtgatatctttcatactatcaaggccacatgtgtctattctctaattaactaatgaaataaaattgttgttataaaatttctttcttgttgacagcaagtaccggtataggacagtgagtctagagatcatttgaacatagtcccttgtagagatcgcaagtaaattgtgtacataatagaaaacttacacctgagtgacttctaacaattaaggtatagaaaaaaaaaaaggaagcaagacattggagattattctctctcagtagccagattgttgttccttaggtgtaaaaaaccctagggagaaatattttccttgttaggatcttgcaaatttaacccctaattagaaagtattcactttaattcaaaacataataagtgatttttgccctaaactttcttatgtccagacttacaaatcatcttggactcctaattcaacaagtgttatatccttagcctctcttatacttatatctacttatttcaggcgactcctaattcaagctccatggctaccaaactgtcatctccatgactcacctccccacagtcagcttgtgggcactatacaggtgccaggctaagtataaagtgttcaatgattgtgtagtgtttgtcaaagtgctgtgcgcaaagggtgttagattattctagaagatatgtagccgaactctttttaatagtcatatttaatggcataaacacattgtatcattccattacttcatggttattgttacctaaagcaaggccatgtaaagaatgaattgatagaaaatcgatttaataaaaaaagaaagtggtagggagtcgaccccgtggctaagtggttaaagttctgtgtgctccactgtgaagcccggggttcacaggtttgggtcctgggtgcagacctactccactcatcagccatgctgtggaagcatctcacatacagagtaaaggaaaattggcacaggtgttggctcagcaacagtcttcctcaagcaaacacaaaaagaggaggattggcaatgatgttagcacagggtgaatctccccacccccccaaaaaaaagaaagttgttgggttaataacagtaaagataattctcaagttctcagaaatagcaaaaatttaaggcagaaatactggaaatgctaaagtaaggcacatccaggaagaagacagtggatagatggacataaggctgcacgctgttttagagacatttctttctgggcccatactcaaatctagtgttttcttctgttattctcctttaattttattcagttcctcaaatatgtattctgccttggactcctggtttgagtgttcaccaaaaccattaaattcaaacagtctccttcaaatcttgttccttctttttctgtttcaacttgtagtgggattatagaattttattttatttatagtcccatttacattaaaggctgccaagattctcctagaagcgtgcaaggattctgctccctcaaaagatggagatcaccttctttccaaatccctgtgaaacattgacaagattggctattttgagagccacaaaaaaccttcagactctttaaatatataaatagtattgacaacattctctggtttccatacaataaagctggaaaataaaaacaaattggcaagcaaaaacccaatttaacgtggagatttaaaaatcctttcttaaagatatatagaccaaaatggaaatgaaaacaattgttaatttctagcaaatcataattttaaagacagcaaatgtaacttttcaccaaatctaagatgacatcagttatgagatacgtggttattttatatttgttaagaataaagtttctgctaatacactatgactcaagtctttttcaatccttagaattttccttccactgtaccagcaaatgcattagtgatgtggcattacttaagagaatgctccattattatctccagaattttcttccaagccattgacactcattttgaaagttttcatggtagctctttcttgatcttctcagaaagtgtccatagaatattttgggttgacaaaatgaaaacattttaagcagcaactaaactccgctcttgcagtaccaatagtgcttatgactcaacgggagcaatgccagtaggaacagcatgcctgaggctgtgcgggctccaggagtggcagctatgtcaggactgcagcttggcttataaccattggaatctgatcaaaacagagcttagtgtactaattagatgcatatgttcaccctctgatgaaggcatttcttgattctatgaagtgttacaagttgaaatgacctaaaaatttgtgtctcagaattaatgaaatatggatttagatagtatgggaacccactaaggcattgcttgcaggaaaatccatcagcttaaatacttgcattaataaaatgtgaaaaattaaatgaattaagcatctaggttcaaactgttaaaaaataaacaaaccaaaggaaagaagaaggattgcatttaatagaaaaaaaaacccaaaaatcaataacttagaaatcaaaaaaaataaaacagaactaccgtaaatacagaagataaccttttgagaaaaataactataaatatatagctcaactgcataagggagaaaagaggacagcatgaagacagaaaataagaaatgataagggagaaatagccactgataaaggagaagttaaaagaaattcagttgccctcagttgtaaaaggggataattaatccatgttaatccatgggacatttgtggactagtgttaatgtatttaaagctcctgggcctgggccctgcacacaggaggcattcagctcgtggcagttactgttgctgctgataatgtaaattcaggtgttaatatcactattccgctactactattgctgttactagcactcctactgctagtagtagtactgctactgacagtccctgctattattgccaccactaaacagtggtgatgataacgacttgctcaggatgctcgtggaacatctgaggtggatgtctaacagagctggagaagtcagggaaggtttactgagtaggaaatggagaaaggtacgagggaacagaatgcatgaagtcacagagggatgcaggatctcagtggaccgatacgtttttcaaagcggttgttgtatgcatgcgggggggggattaaaaggcagatgataagtaataaagtgaatgcatgaatcgggatacatatattaaaacattaagacccaattcgaccaaattgttttactgtggtttttattggcttatctacgtgatatcctatacaaaattttaaaacaacatgccctgggtgtgtgctttaaatttcttttgccctagagtttgaatgcatcacaggataaatagaagaggccatggtaaatttactttgaactcttcaagaagaacaaaccaacgtttgctgaggtatctaaaaaaaaaaagcagcaaattttgttaaaataagagattcaaactggtcataacacatctcactgccaaaacatgtatttgccagaatttttgacaagtagaaggctcctttagaaatagatggaggtgctttaaagtacaaatatgtgcctataagtaatctggctttttcaaatagaagaatctatgacaataaagatatatggtatggcagtttgttatagtaattactaatttaagcagttttagcttcaaattctctttctacatcttattttctatatctctactgtgtgtatgtatgtatgtaatgtgtatatatatatctatccaacatatctatattttaggatggttacttctctaggattcagtttctgtatcagttaaacagtgcctcatatatatcctataaacttgatgtgataatctggtgttaatataaacaaaatgctcagcatagtgctgaatagctgttattaggattattacaattgcttccctttttctaaatcattttccgtttgtgtggacactccttattaaatcttaaacatcccagggttcacaagctctagattttctttcagtgcaattacaactcttgtgcccctgggcgccttccaactctaggcaataaatgtccctgctgccagccagatgagttttaatttaacccgcccgctcaactctaccttcctcctcccgcattctgcagtgaaaccaatggatgtgtgctgctgctcatcagttcggcttaacacttcataatggcaagaaaatacccgtgcacctgctgcttatttatgtggatgttttgtcttctgtgtttgtgtgtataaagagctaaagtattcaggcttaggaagtagagtaactgcggcccatgtgtttgcatttctgagtttgactgtcctttcttctaaacaacggtgatcaggtctgcatgggtgtgcgggcacaccggtaattggcacatatgctaaaacatctggggctgctctctcccagatgcgtcctctgtgaacctcttcatgcctactcctggcagcctctgctgtttatggactttatattaccacattctcatcaccatcattcagcctgtcatctccgaggacggtgacaaaccttaaaaattgagaaggaggggaagtaatcctcagaggggattataaatgagctgagccaagaacttagggagatggctcaagctgccaggtggtacttgggttgaaatgaccttgctgactagaatatttgaaagaatgtgtgagtctggatgaattttctgagatgcagtagagtgtaatgtttaagagaaagagatttggattcagatttggatttgaatcaagcttcagccacttataaccaacatggccctgaccaaatcgtttatcacttctatcttcaggttcttcccatataaaacaggcatcataatacctactccatagtgctgtcaggagggtatgatgcgatgttaggaaagtgctcaattcctgccgtgtagtaagctctgggtaaccagtataatattggtgatgatgatgatgatgatgataaaatcatagatttggctattatgaaaaggaaatctattttactctgaattaatgctgctaacagatatgcagacccgttttcagaaaccactgaagattaactatggtttattgagttatatgtagttctctcttagtagtatctcagactgtccaaacagttctaggcttctgttctccctttttagtcttatttcctactgttctccaatacagacctgatgctcaagttaaattatatagtctacaaataactattccctattgtgttcaccttaatatccccagcccctagacccgtttctgacacatcagggaatcaacatcattgactgatcttcccatatgttccagacactgcctatgcccagcggctacaaatacctcctttttaccctatttcttttaatcaaaaccttcacatctctgccttttacctcttggctcttagctccaaggccccccttatctactcttttccgagaagctgagattaagattccaaaaactacgtttctcagactccattgccatccaatttctgtgtgtgttttgccagtggcagatattggcagggaaccgaaagatgaaggttgggagaaggactcttttccggcttccagtttgtatcttgctctccagtagagacagacaattgtggctccagcctccaacttctgtggcaacttccagccccgactcacttcacctgaggcaagaggagtaccagacatttacaccccagtccctccaacactcagccatgctcctctgggtggtctcagaaaacggccagggtccctcagtgatcctggatctgtggggctatgaccctccttctgcttgaaatgtgaccaccaaccgcagggagaacctactgctagacactccgtctctctttttttaattgtgtcagccgccttctaaaggtcacatcagcatggggtagatgaccttgtggtcttccttagcctctctgcagctaagtaaccaatgctcagtattaagtacccactgtctgaaacactagccatggcttctgttttcctggttggaccctgatagagcatctttcagagttcatctcaaatgccgcctcttcccctggccccacaatggattctttctctcatttaatgcctcctagtgtttgctctcacatcatttactgaaatttatcttctttgctttgtacagaaactctttctcagtctttgaaaatgtatcctaacaatttcatgagtctccaaattcatactatactatcagttttttaaaattctgtgctttctgttcagttccttcactagcactcattgcaagcaatttttgaagagggctgttgcctcttcaaaaagcagagttttcccctcattttctctcaagtgtcattatgttgaaatatccagcaaaagacaggcttacacactagccaaattgttgagaacatcagtctcttggtgcatgcaattcaaaaatgtttcttggcaagcgtatagattccactgaagtttgtattagtttgctaacctgccaagacaaagtaccatgaaacaggtggctgaaacaacagaaatttattgtctcacagttttggaggccgaaagtctaagatcaaggtgttggcaggcttggttccttcccagggctgtgaggaagaacctgttccatgtgtctttcttagcttctgttcatttgcttgtagtctgacatttctaggcatgtagaagcatcacccagatctctgccttcatcttcacatggcatttccctttgtgtgtatctgtgtacaaatttccccaaaatccagccgtactggattaggagtcactctaccccagtatcacctcatcttaaataattatatctgcaatgaccctatttccaaataaggtcacattctgaggtgcttggggttaggacctcgacatatgaattttggggggatacaattcaacccataacaaggttacttgtaaaaagttgatacctggctactaaattcacacaagtctatcatagtgtaataccgcttgaactatatctctcttccctccaggaaagtaggttttaacagatagtattatttcttacccatgtctttctcgccacggcaccgcctcatggcagagtatttttgacccgaaagctgcatggcagcactggtaatggctgtaatattattatcacgtacttgtctgtctccccttctagtttataagctgcttgggagtagggataacatgtttcttcccctccagtaagaagatagagggctttatgatacctcatgactgatcactcaagtctatgtaatagagcactcatgcctcatcatagtcagcactgtcatgactacaaatgtaacttctttcctcatccatttttcagtttacattagactactttgggggaataaacaaatactgtttttagagttatatcctccatcctatggtctcccataccatttatgcattttacttatctttgctttccctaactgtaaccatttgactggctatagtacatattaattaggttttgttgcacatgtcagaaaatcaaaaacattagcttatctagattagtggtatatttttatcatgtgtactaggggcaacagcaggctgaatcaggctgtcatgaaggacttgagctcatctctttttgctctactaggatttgtgtttatttccattcttgagctccagcctttacggatacatctcaagaagcaggaaagaggaataggagaagggaaaaagggctccctttccacgtaagtctaaaccccttgaaacagtttcctcagatgcctcacaaaatgacttccatttatatctcattggtcactcctagtttcattagagaatggaaaaaaattgggcaccttgctagtcttaataaaatcaaggttctattcttaaagtagaaacaagaacagatgtggataggtaattagctatatctgtcacagtgattataggagataattaataactgtttattatctgtaattgaattttgttaatatgacttttaaaaattatagtagagaatgccagcttcctgtgctgataaacatcgtggtattaagtcatcgtgggaatacttggtgagtctggcagttccttactgatttgtacacatctgacattaggcaatatggagatatatccatgcattatcttctgtaatttgtcttcatggcccatatgtctgtgactctacatttgcgggttccttgatgttgcagtcagaaagtctcatcttaccccagcaactactgtctgcctgttttctcagcagacctaaatctcttaaaccacctaaaactgggaggtttgggtctacttatccagctcactgggttttcggtggatcagcacgaaaaggattcaagacgtgttttgtacaagttatacaaatcttgctaaacacgaattaaaaccagtacccttggatggctatttaagtcgagagtggagtaataagagctttcacacacttaattatggaacatcaagtaaattctaatgtaacttagaactctactagtttgagttagacagacataatttacgttcaagaactacatgacaaaaaatccagttcattttagtaatatgtcttgggctagcatccaggaaaaggtgggaagaagactaacataactctaaacaattactcctcttcatatttcttggttccgtcctttatttcatcatatgcctagtttctaagactagagatcttaacattgtccttctcttgcttcatatgcagtcaccaacctgtcttgattctactctgaagtatgtttcacagttgccccttcctttttaccaccatggtcttggatcaatccacccacatgttttttctagagactatgatactggcctcgttactggtctccttgtcactctctccctaaaccaactcatccttcacactgttgccaacactaacttaaaaatactttttggcttttcccagtctatttatagtggcatgagaggcctctcaccatctagagctcaactatatccatcacctcatttgtttacccttccctatatgtatatatatgctgctccaatgactccaaatgtcttttattttccctaaagttctttgcttgctacacatccctgcttattagatactattctctgtacttagagcttccttccccctctgtgctagtttgtagagaaattctacttggatatccagattcacctgaaatgtcactcctctttgaaactttctttaattttcttgggcagaattagtcctctgttttcctcatgttcttatcccattttattttacagtaatttctgtagagttttgtctgcttctcgttgtcctgtgagcttctcaagggtagggtctttatctcactcatctctttatatcctttggcctctccagtacccaaaacagtgcctgacatatactctgtaaatgattattgaagagttatgaagctgtaatgaatatcattgaagtacaaatcagttgctttaggcacacgttgtaggagatgttgccgatgtggatgtaaaacatgaatagccatataatacaaatagttgccattttgtagtacttatatgccaggttcaaggctaagcagtttacagattcttattaatgaaagcttcaaactattctctggtctttttctctttctctgtgcaagttgtgtcaggtcacacagctggtaaatagaattatgactttcctctacatttgtctgaatttaaagctcatgctcttaatgaatatcctctagtgcctcacttataaaaccatgggcagatgaggaaatgagtgagagaaaggcagatggaggactcccaaaatccctatgattccagggacacatggaaggggagtcatgtctcatcctcctcctgggtgtaactgcttttccagctaaattaaatattgaatctttggaggagtaggtggttagtgggctgagcagatgcacatgagtgatcatttctgaatcctcatttctgattaaatccattgaagaagggccactgtggtcatcttgctacttctcgtttgggaatgagcaccacatctctgcactcatcaaccggcagcataaaacatcaacataaaaatgttttaacttttgaaagtaagatggaccacaacctacgtgcaaaagaggataacggggattggacgaagtgaagaggcgtggttttagattcaggcaattgttggtgtactttcaattttctgatctataattaaatataataacacatatcacaaaatagagatactagataaaaaacacttagtatcttagttatattaattgtttagtaaatgatgtttgattattctatttcttatcctcctccgttccctcctctttgtctttcaaaaggtttaggtgatcccttcagttgactaaagaggtgaaatgcttgttgtgtggtcaaaacaggcaatagatagtcttatcccctcagacccatgacctcctccccacctgccacatgtcttctcacctgagagccaaggcctcatatttcccaagacccatttcaaatagcgtcattttgttcttctcgtcttatccctctttcctagtcaaatcatctgtaatctccaaactcccaccactaaactgttcttatcgcggttggtatattttatgtctctctcccattgtcaaatttgaggggtttttcctgaattatctgtttatttagatagtttctcattaaatacttaatgagtaaatgatggacagggccacccattaatttggcattctgtaattttattgtctttcaaatttattatcccatttagttctcatgttaattgtggggaatcttcagtgcaagcaaaatcatctcaatttggacatagtaaggtacagagaggttaagcactatgccaaaatttgcacagcaaggtaattagagatcttaaataaaaattagatttttcagattctctttccaatgcaaatcccgttatcctatctgacctatctggaaaataattcaaacacacaggaagtacaaagcatttagttgatggaagtcattctgcacttggatcaatatttaatatatctattctttctaccaatttatattaatatgcttgtggcaaaatacatctatctttaaaaagatctgttaatcattagcattgcaaaatcatgaccatacagaaaccgatactttgaggtgaaaactggttattttaacatctctattcattaaatcaaacatttaaaatatcagatcaaccaacaaagaagtaatgtttttaaaatccagcaaaatccagctgacattaatgagaaattacaatttcaaatgcattacccttgtaagataactcaaaggtaacagtaattaagataattgcaaaagatattttgggttctgtgtatttgcgcaagtgctgagaggtggaatataaatgtgcaagtatttttgttcacttgggtatcttgagcttgaaataatttttagaccacaacattttttcatactgagttaaaatctggaattttttgatgcgctcttatctctgtgtgtgcacatattctcaaattttaaaacaaaatactgattaaagaggggtttgtttttcttcttgtgcttggccttatagaaaacatgaagttcaccacatgatttttgtcttttaccttcttgttatgttggttaggaaaagtcttctcatttccatttgatatacaataaacatgtgactcattatttggttctgatattaaaagtcatcaagtcatcattaaatccccaaatattacgtgtcatttcattgaaggaatttaaggatgaatgcttattggaggtaagcaattacattcttttagttataagtgatttctacaagctagccaaagagagggggctccatttagacgtaatgtgcacatatgttcattcttggtaatggctctttaatatcagtggtgaatggcttatccacctctgtaaattaaatgttaatgatagccactttaactctaatcattcattctgaatctttcagattgcttatatgcttcaataattcttccacagtctcaagtatcccagggttcagcaacttttcaaaataagtatattacaacttcaatttatttctttgcctacataaatgactcatccataattgttttcatagtgaatgagctagctactagtatgaataagaagggcagaagagggcatctaggctgatagaaaggaaggaaaagattttattagtcatagacccacatgtgaccagaagatttttcacaaaattggatagtttcaggaaaagttccaggattccatcatgctggctaggctgtagtcacttgcccactcctaaactactcattgacctagggatctcattaacaaatcttggatcacgccttcatcactctagccaagggatggggctttcttcataaatgagcaatgtggaaggcagtgtgatatcccaaaaaacaagaatggattttattgtcaaaaaaatgacttgagacaggccaacataaagaattaaatgatgtaatgtatatgaaacccttcagaccactcctggcaaatagtaaatgctcaattaatggcacctattatcatcatttccttagtaatgatagtaaataatataattgccttaacgtttgcttctctaaccgtttgggtctgatttttctggtataatacatagtgcgcatcaaatttgctccctttccaaagtgaggaaaaccagtggaaccattgctgttggtcacagtttaaatgactgaaattaacaggacaagtcttaagtcttatgacttgtttctgaggtcatttttgaggggttaagggagcataaaaaaattcctgaagttccatttagtctttgatgttaggaactgatcaaacaggctttcctgtctcaatgatgtctaaggaactcgtacttctatcccctctagttttagtctttaatcgattctccctttaactctctctttctttccttcctgtcaaggaaggatgctgaaacagaaatcatctttttctagtacttattgtccactttggacagtggatggcgcacagaaactgcagtcttctgtatatgcccgtaaatcctccagaaggtcctgaggacctcaagcttcctctaatgggaaaggttatttccttactaatctgtatttcctcagcttgctccagtgcacctaagtagtaagtgtgcaatccagactccagctgtggcaaagaagaactctccatgtaatgagttctattatttttccccatgcaatttaatagaccagtaactttaataccaaaaataaaagtttccaagacaaatcaaaatgtgattctaattgtatcttttgttttctttttccagaattgattttgttcctctttattgtgtagtataatctatttagtatcaagaagaacaaggcctccttgcttatttgtggaggcatcaatctagatgttccacagcagcacacggttttctatttcttggctgaactttcctggaaggttacagaaattaaaccttgctatcctaggtgaataatcagaaaaagaaatatgtccaaatttattaacttcttcaaagagctagaaccaagtcaattagtgaagtaaataagcccaccatggaatccttgctgatgcatttaataaaatactattaagtggtatcttaccattgtttagacattaacgttacaacagtgtcccatgaatgagatatatttgctgagttccttgaataaaataaaatgtcttctcaagctacaaaagaagttgcttaacattaacaagtttactcactgcagaaataactaaggttatttggtaccaactacctaggattatttggctttcagtaattttgagtctattgttttgtaaaatgagctgtatttgtgaatatttaactttcagaactttgatctataataggcgtttatgtatttatggatacattttaaattttaataaggctcaattgcaaaaacagctatggtccatttgctgcaagggcctttaaccagaattatggtaaacatgaagatccagtaagctgaaaatcagatgtagaattcattttacaattagaatagcccaatgggacatgaccttaaggtcagaacattgtgcatcaggcaaaaccaaatgaaacaaagttcaaattagaccccatgaagtatcattggaagctcatctgcatttacattatttacttatttttagaatgtacataaattacttccccatggaggaaaacaaattgctacatagaaagagagaatgaaatattctcaaaggagcatcacctgattaagaagagaaaagtcaaagtaaaatgaaacagggcaaataaaggcatatgtcaagtaagagaaaaagtcccaagaaaaatgaaaaaatttagtaaaacgttatctccagtggaaataaactgctggaattgtttctttctgcaaacttagatattacttatttgggagaatgggagaaagagtgagacttaaagagtagaagtgttagtagatatgagtcgtaggacctgaattttagtctcaactctgcccctaatctgttatgggaccttgaacaattgatgtatttttttcaggttcttggttttctcattcataaagagaagttgatgttcttgctgcctactatgacgatatggtccacactgctccttctcttccttcaacactcaataaatcaccactttttctgtgaaatgactttcacagcagagtcattgtttcttctgtccttcgctcagcactgttgagacctccattccatcacgggatgcatgtgtgttattctccttctgtatactctgaactgaagggagagctgctatcaattctttcttgaataaatctagggatgaatacataaaatgtatacattcatggagaatgtatatgtttggaactgccaatgcctactacagagcttgacaaatgtctgtgggtctaaaacatattgccaaataaatttttaaaaaatgttttgaaactgtttagaacgaatcaattcaatgtcctcattcaaattatgaaagatctggatgcagtgacctctgagttctcttctatcacccttaaaagtaggtgataattatttattattacaattatttctcatcgtgtatttgctgatgattatgtactatactgttctaaagctttatatttatcccatctagccataaatagacctattgaagtaacttttattatcccaccttttacagatgagggaacagaggcttagaaaacttaactgtcttattcaaagcagacagcagagtttatatgcaaattaaggtcctcctgattccaaagcccatgctcttatccactgggtaaaaatgtacagagaaagatcctcatgcatgtgggttcaaagtaattttattgactcaatgaaatgcattgcacagcatgacaaaggtttaggaagtcactgcatcaaagaataaatggtcgcataagaactgcttataccactcacaggctgcttgcttctttttgatcaccacagtcttaacatcacaacatccagtaaagcatgatctacataatctttgcttcccttttcaattaatttattatcatggcatggctctaaacagacaggagatcgctgttttcctttaatcatcacttttgactatggtatctaagtaaatggtgttgatatccttagtccttgtacctagatgtgtgtgttttttttaatatcacctggtaaatcaatagtctttaatgaggctagcaatgtatggtttgtattactatgataaatttaaaacctgaaaaacagattgcatctcatttaaggaaacaagtgcaatgcctgcgaaggtccaaaataaagctgatttgtagcacagcccttggatgcagtgcactctggtttatggaagtttctggccacagcacacctctctagctaccttgtaaactcagaaggcatcagaaccatctccccctcacaggcgcttccgttcagtctctcagccaggaacgtgagcattatttaggggaaaaaatagtaacaaaagtcgtggtcaagcatatttcggaagtactgcatgctctacccactactggatgataagcagtgcacatacaatagtcccccgttatccacagggggtgcattccaagaccccctgtggatgcctgaaaccatgaatagtaccaaatcctatatacgctatgttttttcctatatatacatacctatgataaagtttaacatataaattaggcacagtaagagatcaataactaataatacaatagaacaattataataatatactgtaataattcttttttctttcgttattaattcgagaacttccaccttttcacttaaagaaagcagtttatgacttctctttggcttattagaattgccagcatcactactcttgtgctttggggccattattaagtaaaataacggtgacttgactgcaagcactgctataccatgacagtcaagctgataaccaagagggctactaagtgactaatggatgggtaatgtatacaatgtggatatgctagacaatgggatgattcacttctgggggcacagaaagggatggtgcaagatttcatcatgctactcaaaatggtgggcaatgtagatcgtatgaattctttatttctagaattttccatttaatactttttgaccttggttgaccatgggtaactgaaactgcgtaaagggaaaccatggctaagggggattactgtatttatatttaagatggtgaaaagtgttgcagtaaagaagtgtttcacagagctttacccagcatttttcttgacaactttttatattgttttgagtaatgtctactgacatgttttggaattagtgttccatagaagaccctttgcaataaactgccctatagagttatttcagggtaactggcagtttgagaaagcagtaatagcaacattttctgaaatcacctgggacaaagaaatcacaccatctcatccttgaggaggctaaccagtcttgggagctttgactttttattcctgtgtaaaccaagagacaaaagacttgagtttgtgtcccatctctgacacatatcacctgtgacaactgggacgagtcatttaactcctctagactggattgtcctaattgctaaattgcatatagtgatagctgaaccatgtacctaacatttttgtcgataaaacacttcataaaatgaaagaactatgtagaaaaagaattgccatcatatcaatctcattgaaattatcccttaaagcctctccaacttgaaagccaataatctatgaatatttcccagtgttctcaaaatccatttttatacatgtatgtttcccatctcttaagaaaaagaaatcttttgactttacaaatttactaagcaaaatcacttaccgcaatagtatattgagacataataaaccaaagataatcttttctttgaaatattttggatctgaaattattccagggttaactaagcatgtgtttttatacggcacacagctgtgtccacagacacacctggcccagcatgcttccagcctccgatagacaggctagctggagctgcagctggacctggagttgagatatgaactttgacaaccgtgggaataacaggagacattggtcacagtgatcctatttttgtctagatgtataatgaggcttctctggttaaatgcttgagttaaatggatatattcaatatttatttaaaggaaggtatttctcaaacatgacagagaattccatttgaaaggctcctttttcccaccaatatttgaaaatatgttgtctaaaatggttcagatatctttttccttttttgggatgcacccatttaggttttgtgttattcctatgactatcatgctttaataaagttgcacatagtcaactttggagtttctattagaccaggtctaatcaggagaacttgatatagtgaaaaattgaatgtttcccaagaccccattgccacagaagtatcactgaaggccgcagctgttgggtccactcatgctgcagtaatcgaagggagcagattcttctcactgctttgtgtgtgtgtgtgtgtggtatggttcaaagattttgatttttcaaaactcatgtagataacatacagcacagctcagtgaatgtacctgacaggatggaagaaagcagctccctgaatcgctgatttggctgctctgttgcagtgatttgttggatggcctcagataagttaacacagctcgctctgcctctgttatcctaaacttaacatacggaaaacacctactactcatctgcttcttgaggccctttcaagccaaagacaatagggcaatacctgagagcaattctggcgaactgttagaaaaatgtttagatttcatcctggcactaacctacaaattcattgaataccagaagagagttttatgtttaattaaatagcaggataaagaatgaataaatctagacaaaatcaagttaaatgaggctaagattcattcacacatttaacatttattcggcacctattgtgcaatgtgctagtttctgggactacaaagattaataagacatagatgtgatcataaagaactgtacagtccagtgagggaggcaggcttgtaaacagatggtgacagtacattgaaggaagtgctcaggggaataggtgccctgaagcatggaggaagggtgagtggccttctctggggaggtgagacaaacaggggaccaatcacagcagagggaggaggcacacaggggaagggcaggcaggcagaagaaatcacttatgcaaacgcatgacatgttcagtgaagcacaagatgatgaaaagaaatggtaggaaaaactaaatttagttctactattggcaaagaattgcttttggagttttgtctcattattagagctaattatttgagaacagaatatttaaatgtttagagttgtgtctaggctttagtttaaaatacaaagtctgccttaaagatgaagatgactctacaactatcagccttgccttgtctccccatcaaacttgaaagaaaatgcacagtcctctccgtgacctggacgccccttagctcgggctgctataacaaaataacatagactgggtgccttatcaataacaggaatttatttctcacagttctggaggttggaagtacaagatcagggtgtcagcatggccaggttctggtgagagtcctcttctgggttgcagatgcccatcttcttgttgtgtcctccatggcagagtgcagagacaagaaagaaactctctcatgtctcttcttataaggacactaatcctgtaactcagaattccaccatcatgacctaattaccttccaaaggccccacctctgaatatcatcacattgggtttaggatttcaacatatgaattttgtggggacactgacattcagtccataacagccccctcatctctttccctgtcgcttctctgcccctggctgtgcttccagccaccccaactttcttgattttcctgcatttgctgctccctctgcctgaagtttacatctccgattgatttgcatgtcttactctctcatggtgtcattcagttcttggctcaggtgtcaccctcagaaggcctttactcactactttcttcaaagatcatcccccattcatccttaacccttattctttagagcacttatcactacttggcgttacataatacgtcaatttatattcttaatatctacattgagttgtgatcctgcaaaatatatgtccatctcctaaccctggggaacctatgaatgtgaacttatttggacaaagtgtgtttacagatgcaagtgaggtcaggatcttgggatgaaatcattctggatttaggctgcgccctaaatccaatggcaagtgtctttatgagagaagagaaatggagaagatagagctttgactctcttaccctatactaacgatgatgctgatgataacgaaggttaatattaccacataagcaaattttctttcattttctcctttaatgttcatagcaaccacatgagatggtgaattattttgatcccattttataactgactaaattgaagctcagaaaaatctccatgatgtgctctgagaccacatagctactaaagtgcctcatcaagcagaacaggggtctcaggtgggacacctacatctcggaaggcttctagacagtgaggccttgctcagtctctgtgcttcttgtagagatatgctctcgagcattagcattagtagtagggaaaaaacgcaaacctcctctgggggtgtaagatatgcaaatattacaacagatatttttgtatacattatctcattcaatcttcttaacacttcttcaaagctgctattgttagcttcaatttataggtatgaaaatggagattaacacaaagcttgagagaaatggatcgcattttgaaatctgctatggttgactcaaaaattcttgatatttccacaatagacaactttcagactacacagcctgtgctcatgagttattccaattcttttatgtcccattttgagctttcacatgttatttcctacaattctgcaactgaactgcattgactggcctttttcatcagtgctctctgcccttataagaaagattttgtgttttcccactggtcaccacctagcgcttgttcccagggggctgagcttcttgctgctttcttttctcaggacagctgaggaggatgtgaactaggaagttgtaaaaccacctttggaattttggtggttcttctactctaacttagcaaaacttcattttgcttgtatatttcgcacccacatcccctttattttccgtctgtgcactgtgcttcctcatagctttgtgcaccccaggaggcctgggagaagtccttcacggcaagataaggaaagatctgtaaggaaaggtcaggctgccaagagaagcctaaaaagctaggtcttaaaaaaaatatgctttgctgtggcaaggacagataacactctgccctccacatcgtcctcaacctctaccctgctttaaaaaataaaagtattctcagtcctggagaatttcaaactccatggttatatctgatcagggtatgggcaagaaatattccataggtaggatttctaatacattgtaataacaggagaaaatagcaaagtgctctctgcacactgtttattctgtcttgggatgagtaattttcagatgcttaaaatagttcctctaatgcaagattggtaagctacctcaatccgcaaagctagttttaaaggaagaagtcaaatgttttgcattgttttttttttcaccctgaaaattagtcttttatctgtatttctattgtatccagtaacgttcttactgaattaattaatcaagacttttgctccaggacttgtggtttgaaggagttatcactacgtggtgagattttcatcttgtttttctccaaatgaatggaatttggggaaccaaatatttaattgaccttttctaatcacatgattctttaatataattttaccacattaattccatatctactagctataaaagtaagaatacctatattctgtaacttataagtttaaaaaaagagctctcctgtatcttttttgatctacacaataacccaatgaccagacagaactgggcaggattaagccactttcacatatgaggaaacagaggctcagctgaggaaagaacttgcctggagtatctgagtctctgaattctctctcaagtaagtatgtcttaactgatgtcttttctcacattccatagcttcttccatttgcactgctacttttgttctttaaagatgcattggcatttagggaggaaagaagataaacaattctagggccagtgaaaggaatgaaggtataaagacccagtgtgtgccaggcagccctagatattttgtatatgctgtttaatcctcatgaaaaattctagcatgccctctccaagagagaaattgagaagtctgaaagctccacatttaacagcttttggcagagttgcatcctttccattgaaagaataataattaattttttattaggctgtcaaggatgtttagtcttttggtaactgttcacagaactaagatgcattggactgtcacatttctatgaactgtagccaactccacagatcatttaataattcagtagggaaagttcttagtagcataatggcaaggagatatgagactggctgtggaattggtacaggtagaaattgcaattattccatatgagaaaatttatcattaaaagctgaaagaaccaaagagtttcaattagacatctgtcaactttatcatctgcctcaatatattcctctcgaataaaagtgcgtttatgttttccaaatataattatgcccttataagaaaattttcagagtttgaagtaaagaagtaaaacagcatttattttgaattttgtatattagtttaaggatacactttatatacagcaatttattcataaatatcatatatattcatgtatgcatatatggtcaaagctattgctcctgtttgcctgattcttttgtttgtttctggttttataaatcttcatgaatgtaattgggttacaaaaccatctgaatatacagtgtgtgaccataagtgaccctctaaagcattttaaagcgtggcaatgcatctgaatgtgaaagtggacagagtagggagtcttcgacactagacatagcagtgtgggttgttggctcagaaagactgagaactgtagtttctttttaaaaaaagtcaagtttatgtttatgtttattttacttttgcaaaatttctctgtcaaaaaccataattgataaatgcaggatatagttctcctggaatctcctattatgaaaaaggtagtttaccacataggtaatagtatacaactttatttttccgttggaatttgtaggaatacatgtctgggatcatgtctgtgggcaaggaggttaagtggtcaagaatttggacccatcagggacagatagagtgatgaactttagggaattgtgtgaaatgagcagtaaccgtaaccgacaggtagttttaacagcagctgaatagattcattgagagaagagagtggctacagacagaaaaagtagtaaagagagattttcagtgaggttatgggatggaatttggcatattttcctgctctgtaatcttttaactttctgtgagcgtgggggttacagtagtcatcctaggtaaggacactagctccttccagtgttcattattaatttaattaacactcttaagactgatcaggttttctggcacttacttcaaatgttaatcttcatggtcatctgaccagcagttaactccttactctcgttggctatgctggaagggagaacttatgtgtattctctcccaccaggtctgtgattggctgtgaacttgaagaccttgtgatgagatccatggagcaattagcaagactgatttgtgagcagcctctcttccctgcagaattttctcatagcagacagatttaagcgaatatatgcactaaaacaccatgaatttaaagcaatgaagatggatggctgccattaggaactgagctgctgtagctggacattatctgatgtgtggttaggttacctttattgaaataaatccagccaaatagatttgcttatattttagggacccacagattgttagcagtggaagggtcttttgaggtcatctagctcagctcctggatttagcagatgagcaaagagagctcctgggggacactgctcatgtgtccaaagtcccactagaatcctgatgttctaaagattatttcatttagaactttttccccataagaggaaaaattcatgttttcaaatcctggctctgcttactacctgagcaagtcacctaatttctctatgcttcatcaggttctaatcagtaatatagaggtagtaataatacataaggcatttaacttttgtgaggagtaaaatgagttactctatatgtgataaattgacaaacagtaaacatcatataattttggcttttttggtgcttctgattaggatctagtagtggaagaaagagcatattgcattgtatttctctagtgattttgcctccaggggacatttggccatgtatggagacgtttttggttgtcgtagctccggaagaagggtggttctggcatccaataggtagaagccagggatgctgttgaacatcttataatgagcaggtcagccccctgcaacaaagaattattcagcccgaaatggcagtagtgctgaggttgagaagccttttttagagtgaaaaaaataacaatttgaatctaggatatgaattaaaactgagtttaaaaagaaaaatgcagatgctttaataacaattatataagtggaagagagtttcccagtttcaaccacatgtcattgcatgtgtgctctccctacttgttaagggctgcctgtaagatttatttgctcattaccaactcttctcattctaccccagtgattagttgttatgattttggcaatttcaaaccatccaagttttttaacacaacagtttgtgaggaggtatatgttttcagcactttatatattgattattcacttggattatgtagagtgtcactactcgctgtttttgatttcatagtgagtaggaaaagaaatattatggtcagaagtctttatagacaatgatgtgcttttccaactgtggaaatgaaagaaagctctcccaaccatttaaatttatttcactggtgattttgaagtgttctgtatgccccagtttttctctttttcttttgaggctatattgatgcaaggggattgttgtgaccttgaagtcatctgcaagtattttactcttatttataaaaatgaaacaaaatctcacaaaattagatgtaatatatatctgggaacatttagaagtttatcaccttttcaaaaagcagttttctggggtcggccctgtggcatagtggttaagttcagtgtgctctgcttcagcggtccgggtttatgggtttggatcccaggcatggactcacaccgcttgtcagccatgctgtggcagctacctgcatacaaaatagaggaagattggcacagttgttagctcagggctaatcttcctcaagcaaaaaaaggggaagattggcaacagattttgctcagggtgaatcttcctcagcacaaaaaaaagaaagcagttttctgcatatgcctgtttatagatttataagatccctttaaaattgtgaataaccaggagactacagtggctgatagcctgacaaggaaaaataagacttccagctgctctgttgttacatttcattgtgaataatgttatcatataaggacctctttaaatataaattttagcatgaaactatctactaaagagagcaatttggtaagtgtaatacactgttaagaaaatgttactcatgcacatatgcctgtgccttatgtatagatacaatgtataaatatatagtgtaatataaatatgtatacatttcactgaaccagatttaaatctaaatctttatctctagattttttttcctcctttctcatttgtattagtcaactattgctgcaagtatgccgtataacaaacagtcccacactcaatgggcttgaaacagcaagtatttatcttgaaactcacaggtctgcaggtgagtctgctttagctgaactagactgggttgggctgggaggctcaggtgaattgcagattttgtcagttctgctccatatttttgtgtcctcgtgtgcagtttgaaggagcttgcttttatcacagtggatcaccggagcacaagatgcaggtagaacctcacaaatacatttaaggccactttgtgcatcacattcactaatgttctatcagccaaagcaagacacatagccaagcccaatgtcaatggactggaaaatttatttttcctatgatgagaaatgaaggaggattggagtaaatatctgctcaaaaatatttccaactatcacaccttcctctttttttaagtaaggataaattttcttttttcctggagttattttctctgcctctccccacccccagaagtgaggtcagttaccctaaaagcaagcccagatctgtgcagcaccattcaacttcacattctatggtacacatctatgtttttccacatttataatgatatgttaatgtatgcatgaatatggttaatttgtttgagacaataatttaattatagactcagacattccacagcataaacaacttaacagggaaagaagacataagaatggctcaaaacttcaattgtggtgccagagtgtaattatgaaatgacataccaattaggagatgcaaataacttttcagaaaaacaaacattttagaatgttttgtgtgttctcctcgagagcgtatgttagcaaatcagaaaggaaaaatggtgtacacagtatttggggtcttggcaagtctgtttctctatctcactttctcttctactccatcgaaatatatctctctttgtctcttgcactctctctgacttatttccttagctttatgtggacgagggttcaagctccctgcgaaatggtcaactttgtttccccatgccgtagactgcacatgcaacatgaaatcatgtaacctcaatagaatgtctgtggtaggcaggattcaaagaatggcccttaatgaccttcatccttgtgtaatctcctcctctttgagtgtggataaatctttaaatatgatgaaatatcactcctgtgattatattatgttacaaagcagagttgaccttaagattgagagattatctgtgtgggtctaatttaatcacatgatttcttaaaagtgaaaactttctccagctggtggcggaatacaccagagagattcgggggatgagaaagtttcaatgtacagttgacagtttaaagatagagggggccatgggagaaggaatgcaggacagcttctaggagaagagactgacagccagcaaagaaatggggacctcagacctacaaccccaaggaactggattcttccaatgacctgaatgaacttgcatgtggattagtccctagaacttctggataagagcctagccagctgaaacttgaatttcagcctgtgagaccctagtagagaatacatcaaggctgtccaaatttccgatttacagagctgtgaaataatagatggataatgctatcagcttctaaggttttggtaatttattatgcggtaatataaaataaatgcaatgtattaaaacttttatgtgtgtgtgtgtgcgtggatttttcacaaggctgactcagtcattggcatcctctttgtttgtgaaagctgacacatgagctctgacaaatcagattacgtaaactttgctagatgtctaatttttaaactggcatcggagtttacttaagtaatttaaccttactattgtacaaaagcagagttacgttttgtggggtctggagtttgtacagttttaggatcccctttaagaaaaagagtacatgattacaacacaaaactaagtgtaaagtgagtatttgtttaggacgagaaattataattttcaaaattataaatttgagaaagcagacaaattacataaataggaataaataaaacagtaacgtacttttaaatatattaactgctttatgcacctgtgtaatatttttcctaaatcttacttgtatactcttcaatgattttgcaatgatttttaaagacagaaagataattcaggcttctggcagagttgatacaaatttactttttttattataattaggaaagtttcctttcacttaacaattcattattttcgatgttatgcagatttctaggattattgtcaaatatgtgaaaatgtctactgattttctttcataatacaagatgtaagatcttgtgatatttcaaattttcttgtgcattaatcttaaatcatcactgaatttgcagtattcattaactagtttatcattgtattctgattttagtaatgtattaaaagtttgctattttcatccttatcagtgttttgtaccatttcaatacgaaattgaaattttttgtgcagtctattcatttgactcattactcattcctcttctcttcttggattacctatccaagagcctattcattacttctagtcaaaatagagctcttctactagtgattactccttttggagtaccctaaatttttatttttggtgttataatttgctgcttcatatcaacataatttctaagttgataatttcacttttcatttttatcgttcttttacattgcattactttttaattaaattttacatttttagtaagtcattttataaatgacaataaatgtaatttcctatcctaatcagaagtcgataatttcttgctgttttattgaaatgtgctataacgtgttttcaaattgcaattaaaatggcctattgaactttctcaagttttttaacattttccaagcttgtttttattcgagtttttcttgcaagttgttggaaatatattttgatgcctaaaatgtctttgacctcaagttgcaagtttcaaggcttgagcagctttgtaaacagcagtccatgcactatctgtacacttccggggttggggatgaccagagatattcataccacctgtgggtcacctctgtacgatgacatgaagtgtcaggcaggtgagttcaggcatcaggtgatagtcatatttgtagatgtcattcctaccccagaacagtcatccatagcttgactctacataaaaagtgatcatgaacctcagagaggaacttagacttttccttagctggattctcaaaatgtccttggttgccgtcaagtctgagagacatgacagaaaattttccatagaaaagttgagtggaaaatgatgatagtgttaattgcagttaaagtattttattttcttagtattaggaaattatacaactgtgtgaacatgttgccagaacccatgcaaggaggagcctgaagcctcagcttcattgactccattgtaaatctgactctgcagatgggtgtagcatttgttaagtgttaccttttgatttctttctttctctctctctctcttttgttttttttttttttttttatggtgaaccccttcaccctccctccaccaatctctgtctaatcagggtactggtagagtctgagtgccaggctgaagttcaagaagagaacgatgttcctttcctcaggggaaggaaagattaagaaggaaatacataaaaggttatcagaaaaggaactccaataaattagaataaagctaaagcacaactagtctgaggacatggtggggactctatgagactgcggcaccaagtcagattggtattgatagccacgtgtatttgaaatgtctgagtcttaggctggaatcttttaatctctttgtctatgatcataagtgatgctctcgaatactctaaatagtaggtcaaaatggcctcaatagaaggattgttaaggcctcttaatacctacagcagagccttccaaacattgtccactgaatgtttgtgtcctataggtgataatgcatattctttaaaagttagatccacagtcataaacttttggtaaataatggattaaacaaggttaaactaggttttctttctacaggacttgaacatttaacaggctttaagtattgactttgggattacatgtgaattttagcaagtaggcttatttgcagatagagaatctgtgaataatgagaatcaactgtataacttaattgcatttacatagtcacttaatcactcatttaaccactcaatggatatttatggggagccactcacctgtcaagaattgtccaggtcctgggactcaggagttaagaaagaaacattatccttctcctcatgaagttgacaatttaacacagattagaggcagcattacttaaaattctctcctgttcccttgacaaagtgcattttaaagtcaaatctaaataattttatacttggaagtttggtgattctagaatgtaaaaacttttccttgaaaattttgaggagaattatcattctaagctaagctggcccctataggcagagctttccaatgttctgcattattagatggttttactttagatcagtgttacccaaatgtgtctctttccaccagagatgctactcagtgttaaagttaaaaaataaaacagaatcttggctcatttacttttggaaatcctgagttttacagtttcctttaatgcagggattttcagagcctttaatatgctaaagtacattgtgactttctagaaagtgatagagaattcagtttctaaaatttatttgaccacaataacttgggatgggtggtcaggtgtccaaaaccagctccttaagacttggacacccaaaatttccatggagcactctttggggtagacacttctgtggctgtcatcctcttactgtccaggcacctctcatgcatcctgttctgcaacatacttcttccaagttctccaagtttccttgttcctgtgctctaagcgtctcttttgatatttaacacttcctttacatcacatttatatcagacgggccttgatttctagaaggagcctctggtaggtgctacggcttctttccatagactttgacttctgattatccctaatgagggagcagcctctttctcgcacatactcagctgatgtgcgtcttgatgtcgaagtattgaagcttacatttttagctgtgactcattgttggaaaactgctgcctaagtgctgtgtacgtgtgaggttgtccatttttgctattaaaggttgtcatgtggcagtgtgattttatactataaaatgttagacttactaattattcggccatgtgcctgttctataaaagctaaaaaaacaaaaaaaagattcctttcgtgataacatgtgctgtaggatttgtgcaaaattatattcgcagaggccacatggtttagtggaaaaagcatttagattttcacatctgaagacctaattaagttcaaggcccagcatctctatttgttatagcagtgtatagctatatgcaaattattgaaactttgtgtacctcgatttcatcatgtgtaaaaatgggcaaaatggtcaacaggattcttaaaaagcatgtagaaaggcctctgatacaacgtctgaaacagaataggtgctcagtgaatgttagctcaattctgacattaacatttcagtagtcttttcattttttgtaaggtcttacataagtttataaacaaagttatgacgcattatgcacaatttaaaaaattccttaatttacaacaccaaggaacccaatgttaagaatttggagaatccttgaaatgcactcattattcttgtttcccttccttctttctttccttccttcctcttttccttcttccctccctcccttcttccttccctccctgtctttctttccctaaatggggcattttctggtagttcttgtaatttaggagctgctcacccttataaaaggtgggccctgagtttaacaaaagatactttagctgagacgttggaagaggtgaaactggaaaacatgaggaacattgcgtttgtggcagtccaaatgctgttctcgtgcaggggatcgtcaatgcacataattcgtaatcaatccataaatcaaaattggagtgagtttgttatgagccaagtctgaggactatagcccaggggcttctttccccaaggaaggaagcacaccaaagaagtggggtgtacagagtggttatataccattttggaacaaagggcatacatcacgtatggcaggaatatttcttttattcctctcacaagatgcttagcagcacagcaggtcagtaattaatccttagtttctaagacgagatgcttatccttaaagaaatgctgatatggggggaagctacatccctatgtttaagggcatcattcttgtctttggaatattgtaaatatttaaagcaagtctacaatgcatgctcagcaaggtagatcagggctttctggaaaaaacagaatcaggctgaattagttttaaactgtctccctcatatactccaatatatcctattgcttttcatttattcatcaggatggattttgagatttacaatgtacatgatagttttgcatctttagtcctgttgcattcatacagggcatatgctggcatcatagaagcttgagaaatattgcacttagctcaggtgctgggacataagattgataaaaccagcgtgtaatatgtgctccatgtagagcatgtgtttataccttgtgccattttattatcttgcagggaaaacacaagtataaggcatgaaatattggagatagaaggaaatactaagaactccattgtgtaagctgcagtttgtgagctaaggaataatgaggaaaaagaaaataaataatggtctgtggctcttgagaagagaagtaatagactggaactaaaagaaaatgaatactcttttaccttcctcctctccagctacaggcactgatatgggcctcagaagccaggcttctatttccgctgccttatattctcaacactgagcatggcatctagcacatcataggtacatatttgtggatgatgtattcgtttgctaagactacggtaacaaagtaccacaaactgggtggcctgaaactacagaaactcattgtctcatgattctgtaggctagaggtctgaaatcatggtgttgtcagggccataccacctctgaaggctctggggaagaatccttgcctcttctggcttctggtggttgctggcaaaccttcacattctttggcctgtaaatgcatcactctaatctctacctctgtcttctcctggccttcttttccgtgtgtctgagtttctgtgtcaaatttccctcttcccataaggactccagtcatattgcatttaggatacactctaatccagtatgacttcatcttaactggattccatctgcaaaaaccctgtttccaaataaggtcatattcacaggttccaggtgaccatgaatttttaggggatatttttcaacctaagatagatggtggggtttcttctttttttttttggtttctacaatggccaagagctgtaccaaacacacacaggtcactatgcttctgtactttaggatataaatttttaaaagtatcctactgcttttttggtactatgaatttttttttttttttttttgaggaaggttaaccctgagctaacatctgccaccaatcctcctctttttgctgaggaaggctggccctcagctaacatctgtgcccatcttcctccactttacatgtgggacacaggccacagcatggcttgacaagcggtgccacatctgcacgcaggatctgaattggcgagccccgggccgatcaataatgaatttctggaaaagagcaatgaaaaaaactatgaaattaccctgagaccttatggtaaagagagagaatttctataaagccacgcaatagtctcattttcttgtgatcacactgtatacccattctgctctgtgcaccactcattgaggattaaattggcacagaaatttcagatcatctttgattccccaaattctatggtagatcaaggttctggatcatgtaaaagctaatcaaaacttttcttgtcactttcaaacttgtattttgtacatcaaagttttcattggaaaaagtaatgttgaagttacttttaatgaggtgtctaacagcatcttatggatagtggtgatgggtaatagtgccacaccacatcatggcagcactactgagtattgtttatgcattaaagttcatggtaccaggacccagcccggtggcacagcggttaagtttgcccattctgcttcagcagcccagggttcgtgctgctttaagactttgcacaagttactcaccttcgctagtttctgttcatcagagagggaagaggagaggcttggaggacaggatagggtgaccagtgtgtcttggtttgcttgggactttcctggttttaccagtgaacgtcctacatcccaggaaacccagaaaaacagggatgatgggtccccctgcaaaactgttgtgaggatttaatgagatgacaatgtgaaatgcctgcaaagtgggctttgaaggaatcatcagtattacatcaatgatttgggtcatggaaacttctgcttcaggttaagatccacagaatcagagcctgagctggtgattcttgtgcaggtggtttactgtgagtgtgcccaggggaacacatgagagagtaagggaagcagagtagtatggcattaggcaaaggtgtctgtccagctgaagggtagcctcaacttgatcctatggaaaattctggcttgtgaatggtaccacagaattgcctcactttgggacaagtgggctggccatttggattgcacatcatttagccattggctgcaggccacgccagtggggcgtttctatttgagggcaattctcaggagaggggcaaagctgtgtactgtaatgagcaacactgtgtactagagaatgggtgcacagcctgcgatggggacctgagcattgtccgctacaactaccaccagtgtcttctataactgctcaggagttttcttaatgaacatttcttaaagaacattctagcagtcagtttcagtgaagtgacaccagtgtctgctacaactgcttaggagttttcttaatgaacattctagcagtcagttttagtgaagtgacaccagtgtttgctgcaactactcaggaattttcttaaagaactttctagcagtcagtttaagtgaaggatcccatgttcataatgtgcccccacttcatggcctccattttgatattgagatgtcttgccacctccttgatttacagacactttaagcgttaatgtttgattgtctaatggggattttaaactcctttggaggaaggtactacatagttataaacaacaccgttgctgtttctggctggtatgtgtagggagagtacttttttttctttaattcattaacttctgatgggagatctaacaaccttgagatgtaaattagaaaagaaatgaaagctgatttttaaatcttggataatataatgtggcagattcctgtaatttaaaacaaatgccaaagttaaggagaatgcatcttctccagagatccatataatttagaaaatgtttcaattagtcagcaggcttaacactgctgattacccatcagcaactggaaaagaaaaaaaaaaatacttaaaggcaaagtggcaaattagctcatcagcaagttgatacacatagactgattttaacctcttcagatttagagatttttttccccaaaaaaagttatattaagtattgaaatgaattttctgtagagaatgtgtctaccgacttgtgagaatggagtgttgctgatatgtgtggtatccagctaaatttctaatattttcttccatcctatgtgttttccacttcatctattagcatgtacaacaaagggatgaaaatcatcgcatgcatttgtaataatttgatgtttttattaaaatgctattttattataatggaaatagtgaactttaaatatggaaaaaagatcttatcattataaatgtttgtgaacttcaccacaaatgcgatgattgcatagatggatttgtttttaaagtgcagttgcattaaaaactaccaagtactttgctgctcagaacaaagaaatatatttttgtcattggtctcatataaaattataagccttaaaaaaaccttttcaaattggggaaaacctaattttttcttttttctttaaatgtaaatctctatctttatatatttatagacacaaattcctatttctatgcaacagtgatttcatagtgcagttgaatgtgccaagactcaaagtatatcatacatagaaataaatttctgaaaatattcagaaaatatttaccatgcactgaataccatgagggttgctaaaaatagcaatgcactctcaatttcctgccctcatcttttttaacttatctcatgtaatcattttccacatcaaggtttgaaagaataagaatttcttgtactatgagttgtacattatgttattgctgaccattaactactttatgtacttccacctaaagtagaataaaagaatatatttcaactaatgtattttaaatataatatttagaaaatagacagacaaaaatcccaccccacgcatagctgtctttttatttttttaattccatttccatcactgttttatcagatgcaagattcttgccctctcctgaccttacattaataacaagttaaactgccgttttgccaaccactttccaatttcccctgtctttactaattctggatgaggtgaggcaagcgagttgatgttcacttggaatcctgggacaacacgctgaaagagcaggtgaaggctccagactctgtcaaaaccatatgacaaggctttttcctctgctagtggtcatggttcttattgtagctcagagaagcatgctttgacgtgagctctcaaatcataattttgaaggatgtcagtcccaacttgtaaactttggacctgaatatacacctaccttgtagcctctgggaaaccatctctgaggtctttgcttatacccatccacataacccagttcatccctgtgagtatagctcatacctttgcttatctctgatgacctgaactgctgtcttcaatttgctgaacttgaacacaactgtctgctgctatgtgggtgccaagaaagcagagacttagtacctgtcttatttagcttagtctttaaaaaattatcaataaatatttcttgaatgaatgaccaaatcaatgaatctacttattatactatattttaattcacctcgaaacttttgataactctttactcagtgacgtagaactagcctacaaaatgagtcctgtgtagtcattaaggcatttacaaggagactagagatctcatgttccgtgtactccctccccaatgcattcatttattataatatcaacaattattttaccaaattgttaccaaattgttaccaaaattgttgcttatatcttaaaatattattatgatatgttacactatattcattcatgtagttacctaaccctagatattgatatatcccaatatataaagaaaagacaaatatttaaagaataaactttaaaaatagttactaaccaaaactgaattgtaaataaaatattttaaagaataatgccagggctggccccgtggccaagcggttaagttcgtgcgctccgcttcggcggcccagggtttcgccagttcagattctgggagtggacatggcaccgcttatccggccatgctgaggcagcatcccacatgcaacaactagagggacccacaactaaaagtacacaactatgtgctggggggatttggggagaaaaaggaaaaataatatctttaaaagaaaagaataattcaatcatgtttgtcacatttatttactttcagtttcaggttttggtaggactcagacctgtacaatgtctatatgacctttcatgaggactgtatgacctgagagctcaaggtgcattacgtattttccagcagattttttttctaccaggaatttcagtgagaaaaatgctggctccagaatattctttgagatatctcagtgcctcatccaaactgagtcttatagaggtcaagcaacttgtctcttgccacataagattctatctgtccgaaaaatgaagatggcactgacacctcctgttggagttgggagtattaaatgagctcagcaggacaaagtgcattgcacagtgcctgatatctagtaagtgaccaatatgtgccagctaatagttatcccatagtggaatgacatgactactaaaggaaagacttctgaatttcctgacaattgtaatttgcaactgattagattgaacaaaagctccatcatctctgctcactgaacatgatcaaagtgtaagtttccaggacgtgccatggtgcatttaatgtttagaaagaccagacatcctcagattcacaaagcaataacactcttgtcttttatctcctaacacctgggatcatgcttcagagaccataatgttgatcataatgcttctcttgacagttgttcccaattctttccatttactacccttcaaaggaatctaaggatttactgctgcccggggtaacattaaaaagtataacaagcccggaaggagatctgagaatatttcattgtaataaaccttcttcaagagagaataggagctgaaaagatcaggaagattgatcctacatatagcacattccattagttctgggtttcagtcaccccctcatctcaaaaccgagttctctcagctatggtctagacttttccagttcctgaactaatcttaacctgaagaaatgtgcttcaaccactgtctccttctctaaatattcttggtgttctatgtcccacctctgggtgagcttgacactggagttctaagaagcttttcccctccactgtgtttgcagtttttgattatcacttcacttcccattccaagactgattataacttgaacctaacccatttgtctagagtagtggtcagcaaacaatgacggtgggcctctgaaccagtcttcattctgtcccaacctctttagtttttatcttctcagtcccaagagagctgctgcgctgtacccttccttccttgttctagaaaggagggaacacaagcactaatatggaggaagggcaaagcctatgaaaggacagtgcaacttttgcagaagtcctaagcaggcttctccttctgattggccagagcagttcacatgaccacttgcaagcacagctggggcaaacatgtagtatagctggcatgtttgccacatccccaaaattgtggtttcttttctatggagggaaataaaagtggattctgagtagtcaacatggactgtataattattcaaaaaaaaaaaaaaaaccctcaaaaccaaaaccccaaaactcaaattattttccttgagccacagataaattgctaagtgaagacctggattaaagcaatgcagaaatgcagtgctgactacttaatctaaagaaccattgatctgggatcagtgagagcagtgacctgtaatagatagagacaacagagagtgccgttcagttaagtgctatcattaatcgtttatacagttaatccttaggacttgatgataatgtagtaaaattaagtgctgattagggctgacccatggcagttttttcaggaagttaaaaaaaagcttttatttaggcgatgttttggcctctattgatgggacttgcactgaggagggcaccttcagggaacagcaaacataaatagaagcaggtaatggctggaccctgtggtacagaggttaagagatgcaatgcatcctcactaattttaactaattaaaaagaaatgcagattgattttgagaagtgtgtacaatatttatcgtgattgtcttgcctttaccctttatgattatacaaacttggttttaaaatctgacatagtggaaattttcaaagcattataaatgatgtctgtcttatctactgcaatgtttctctaaaaatgatatggtgtaaaagtactttaacatttttgagcgcctaccatgtaccagctcctatggtaggctctttatgcccatcacatatttcacattcgttataatcctgaaataggttctatttcaattttactggttaaaaaactgaagagtatagggcaaccctactagaaatgttaggctcggagtttgaaccaattctttctgctgcccaaatccatgccttcatcattaggcttcactaccttctatgtgctgaagtgtattagatgccaaggactctatgactcgatgtggtaggaagcattgattcttttgtcttcctcttattgcttgtttaaaaaatatatatgagacagggtgaggagatgagaataagtaatgtcagactaaccgaggggctatcttagaaagttcttttcagttttgtattaatttttagtgtgttcaacgtattaacttaaacatgttcattgttaccttgggaagtgtatgttcatttaccaccattgacaggaactttcctaggaaggaaactgcagcctaagcattttctgaataccacaatcctcaaaagagtgacaccctacctaatgaggttcaaaaagctgtaggccaaattctgtcctcttagggacacagagtcatggaggaaaagtgtaaagcaagattgttagcttaagtgtagaattagtcctgtcctctaaaaagattatgaaaaagagcctctttgcgatttgctgtgggttatatctgataaggaaaaagcatgtccccaaattgctcactcattgcattgaaactcatctgatagtggaagagtaagttggtaacattgtgtaggcggtttggagtcctctgtacattctttagcaatatttctttgaaaatcgttagtgtgtgtttgtttgtggaaaatccatagcgttgaaaatcaggctgtgagctcagtctctgtaagtatgacctccattatgccagaatatgagtccctgaatatcatggaaggcttaggcatatttctgccccatgtgacatgatgcctgggataataggcgcttcatgattgttaaagtgaactgaaatcatatgttcaaatcaaggaaaggcacataacttcagttttcttacatgaagatgagaaggttatcagatgcttatttatatatatgtctatgtatccaaccttccatacattcatatatctatccccctatatccagccatccaaggaggcatgccagtaaaaacaattctggctaatttcttgatttagtaatataaaaattgctttatttttctttggagcaatataatttataagcttaatttaattttcaaaacaagaacaaccctttcctgattactaatgattataaggattagacaggaaataattactgctgatttactaaaatatgtcataataacttgaagattgaattgctattaattaattcaattgtatataaggcttccctcacttgaaaagcaaagaaccattttctgtgattcctagctacacttctaaacccctgattagggcaaccacagacttaggagcatgcttttcacagcaataattattaccccactgacaacatgaacactgttctatttttattgtttaaagaaaaaacagtgaccttccaggttctgagaaatgcggtgcctctatgccagtgaataactatctaggattctggttattttgcgagacatctttcattttttctatttttagggggctttgggaagtggttagatgtttttcctgaagttaaaaatgtaagcctctatactcttctttcacatctgagttcataagtagtagaacatacatattttacctcacttacattatatctggtgtctaaggtgatattatatgtaatataaaagctccacagttaattcagcatgtatccatggcatacctatgaaatagctaactattactaggcatttttaagaatacagagctaaagttagttctttttgctgcctagaatctttctgtacaataatctttctgtacaagaatctttctgcataagaatcttttcctagaatctttctcaaagataagatatgcaaaacaatataaatgcatgagtgtttttccatatacagtgtgtgatttacgtatggttataaaatgtggcatagaaatctccttttgagaaatttttgagttaaattgctccttcttttcataagtagtttgggttgtttttttctaaagattgacacctgagctaacaaccattgccgatcttttttgtttttctccccaaagccccccagtacagagttgtatattctagttgtaggtccttctggttgtgctacatgggatgccgcctcagcatggcctgatgagcagtgccgtgtccacccccaggatccaaaccagtgaaaccctgggccaccaaagcggagcgtgagaacgtaaccattcggccagggagccagcccctaataaatagttcttaattgatgttctctgggcgagttgttatttgtcaaacggggcatggaaattctccaagctagtggagggaaaagatggccagctgatagttttaagccacacgctggctatgttgctgaatagtcttcccgagggcaagggcacataactaacttagcaaagtgccttcattgcacatagtgcatgatgaattcatggtcgattagttcaattaatgtagaagtcattcatggattcgacaagcatttattgatttcattatgtgtcaggtgctgtgcatggtgctgaagaatttatggtcaaccaaaccaacagcattttgctttcatagagcttacaatctggtgatggagctgagagcaaatggttcaaaaagtaagagagagaaagaaaaagacgaggttctatgagagagaataactggggacttactaagagggtttctccgaagagttgatatttaaaatgaaacttaaagaatgaaaaagtgttaagtatgtgaagaatgtgaagacagaggaatagcaggtatagaagctggaattggaaaagaccttcgtatgttcacataattggaagaagaagaagaagaagaaacggtcatagtggctgtagcatcagtcagaaagaagcataacacaaagactgaggaaaagccaggtgcaagatgttatattttacagtcatctgaacactttttgggtctctaaaggactactccataaatagcatctcatctctatctgaatctggacaaagtgagaaaatgctcgggtcaacatggaagccaaaacatccgcttaatgtgagagccaaatgggttcatgcctggaagccaaaaatgatagactcaactaccaaccgattcacaaggagtggacaaggcaggcccacctcagacgggcaggtgaaaagaagaccaagcatggcagagcaagccgacttgttcttcctgcacttaccagacagataggccgcatcaccttctcaaggatggagtgaattaaggaggaggagaggctcagactcacaccaaccctgagcccttcaaaggaaggaagcacactgatggcaaagaaacatggaaggaatattatacaatttggatgttgttctaagtcccctttaaggaaaatgtacatgatccaataaatgttaaaagactacttcaggagctcagtataaatgtatccaaagagaaagatcatgaatgttatttggaactaaatcatgtcaaagcaccattatcaatgcaattttatatttaatatagcacttgacagtggaaagtaaaaaaaatttaaaaattaaatttatagaattaatcacctttggcacagaggcgctgacacattaaaacaaaaagaaagaccacaggaataaaaataaaaagcaaacatatcctttcctatgtgttaggcaatgttctaggtactttacaaatattaactcatttaatgcacttaataacctaatgaagtaggaattatgatttttcatcctcgctttatagataaaggcctcaaaccttagaagatttgagagtttagtcaaaggtcaaacaggtagtaactaatggagttgagatttggttttaagcactctgctacagatgaatggggtgggagtgggagaatttagggactagtttgcattttcttttgtttttgtttcactgctttgggtagaaagaactactcataacaagaatatactgtgacaagtgaaaatgtattttgctttactcataattgcttaaaaacattgtaccacaatattatccctttagaagcattcataaagaggtttaaaaatgcaatgcactgttatttctttcttggagtctctgaagggttaaatgccactccttagtcaattggcttagggcataataatgtgtagactgaagtaaaatatcctaatgtatattatcttaaatagtcttttattttgcaatcacctgtcagctcatttgcctctattaatgcagtgttagctatgacagacacaggttgaagtaattagtgtttaaaatgtctctcaagagtgtgctacatttccccatcatccactggaggagggagatatgctgatacagtctagagagacagtaagctttgactaagtgctatttaaatggcccatgttttttattgtaatgttcatcacaggtcagtgtggtgttttgcaattcacacatgccttccagattgtctgaaaaagacacatcattgaaacaacttccattcacttcatgagtagaaattactctggctgctatgaagagaaacgtggaaggtgattaagaacaaacgtggagagagcacttagcgaactatttcagtagtccagacaaaacgtgatggtgcctaagatagtgaatagagtcaagatatgtttttgagatggctgctctgagactgcttgatagattgagcgatgcaagaaaagaagaattagaagatgtccctacactcaggtttctggtatgagatagatgacaatgataatgccattcttgagtcagggaagacaggagtgggggacatgtcaaatagtctgggacaactggatgactcacattttagatatgttaattttgagatccttgtagacttttaagtaaaaaattcaaagaaaaagaataagagctgacgcagcgtagaacatactatgttctaagtctgttcacaaaacttgtatcacgaattcattgaacccatacacccagcgtaggtggtcattagagggactattgttatccccattttacatgtgaaggcaggtgtacatacaataaaatgagacaatcaaagttcaagtacatagattagtgctggcactaagaaaatgctcagaaaagtgtacattaagtttcttgcttagaatactcactgatggggccggccccatggccaagtggtcaagttctcgtgctccatttccgaggcccagggtttcactgattcggatcctgggtgtggacatggcaccactcatcaagccaggctgaggcaacatcccacacagcacaaccagagacactcacaactagagtataaaactatgtgctggggggctttggggagaagaagaagaagaaagaagaaggagaagaagaggaggaagaagaagaaagattggcaagagatgttagctcaggtgccaaagaaaaaaaaaaaaagaatactcactgatgatattttggatgcagttagatgcccctgctggatgctggattgtttgaaaagtactgtgtttcaaccctaggtacagttgtagatggtaattggaggcacaaaatagataaagctctgaaggccaaagaaattaagatgcaatgattatgacaaaagtactggatgccaaattctatgctccgtcaagttcacgattctacttcacgagatgataatagagggcaatttaattaaaagataatggaataaattaagaacgctctactatctttgtatgcctcagtagcatacattttcacctcataaaagtcaactcaggaatctttcttacccaaattgaagcagtctataaatatcacacatttagtataaagtatgttgaaacaaagctggtggaaatgtttgcctaagttattttctcaggtaggcgtacagcattttctcatttaaaaatgaactgagttaaaggcagagcatgaacaaattgccccgtaacatttgttttttgatttcttccttaacgcattatttactgagtgccgagcactgtgctgtgacatcaagcgaaatactgagttcacctcttaatagatatccccacagaagataaagactctctgaattctaaataggatctgtaaaagcagagacgtaattctctttaatataatgtaatgtttatgagcgagggcttgaggcacctgggttcaaatcccaactctgctaattcctagctgtgtgaccttgggcaagttattgaacctccttgtcctttagtttgctcaataggttaaatggatgtaataatgctatttcctaataggcttctgtattaagtgagctagtatgtgaagtgctgagaacagggcatactctataagaggcactcaataattcttagttgatattaaatctaaacctgattttgggctgggttaatattttctcttcttgggctccaggcaagttgggaagtttattaggtatctgttttagtgtcgccacatatgccctggcagttaggccacttggaatttgctgatctgctctgactacatggacaacttaccgaagattctgttgtgtaatttcagatacaaacctagtagaatctcacttctgagctagacaaaaggccactacacttatggcactacaaaatctctgcagccccataaggattctgagaatctctttttggacgtaaagaaatgctgtctttagctggtgcattctgggactttgccaaccttagcttccaaggtcctatgctctagcaaaggaaatagtgtctgtcttgtaagaaatatgaacactctcaagcattatagaacctggtcaagcagcctgctgatgggtccattggaaataccgttctactgataggttcctttcatgacctgggtcttccccacccagaggggtacttttcaccctctgtaatgagggttcatcttttcaggtcctttctataccctgaggcctcactgagtagagcaactgaaagctgagcaggaactgagagctgtggggttcagttcaccggttcctctgctctccgctcttcttctcatcttcaccggctgcccccctactgtgtctccatcagagagttgctcttcagcctgtatgtgtccttgaggattagggaaggctaagttttcctcccactgtaaataaaatgcaagtttatcttagatgtcttagaattgattgctaagaaaaagaaagaacaaatgggggatagcatttccctttaactcctcagagcaaagttggacatgagtcataagtacacacacttatttatacagttgcccaagccacttgattggttccatggaaagtcaatgaatgtttgatggagtgagtgggtgtgctatatttgatggtattcaaagttcagaaaagaggcactgtgtgaaacgtaggagagtggaataggcacaagatttggaatcaataagacctaggataggaaatctcatgttcatatcttactagtatatgactttggaccaggttcctaacttcccaaaggtttagttgtcccatgtatgagatgggaatagtaatgtccagttagaggattttgtgtggaataaatgggctgttgtgctgtattgagcacatagcagaccccacaataaattgtagtagttgttactataagtctgatagtttgagtcttccagcatagatcacagaagactgtagatgcagagagtgtaattgtaaagtgaagtacactagtgatggcattatattagcatgactggatgtttcctcaaccttctgttaagggaaatttgagtttacgtgccgtgttcttcatttcaaaaggtactcactgaggtcaatcaatatgtcaccaacaggattaagtactatagataaagatattaataaaacaaaatacttgagtctgaaggagggtaggaacacagtaactcatgttgggtaagataaaaatcaatgataagtatggggctggccccgtggccgagtggttaagttcgcgcactccgctgcaggcggcccagtgtttcgttggttcgaatcctgggcgcggacatggcactgctcatcagaccatgctgaggcagcgtcccacatgccacaactagaaggactcacaacaaagaatatacaactatgtactggggggctttggggagaaaaaggaaaaaaataaaatcttaaaaaaaaaaatcaatgataagtagaaacataactagtctattgaaaaacctccattcattggagaaaaacatgaaatgactttttttattttaataactgcctcatttttaatatgttccccgccttcttcctctcccttaatgaatcttgagagtcttctagaattttctgattaatttcagatattaacgtttagtgtagtcatgcactacgtaacattgttttggtcaatgacaaaccacatatgcagcagtggtcccacaagattagtaccacatagcctaggtgtgtagtaggctataccatctaggtttgtgtaagtacactctgtgatgtccacacaacaacaaaatcacctaaatgatgacgcatttctcagaacgcatccccatcattaagcgacacgtgactgtactttgaacctgcttatcacattttcaattcaaaactctctaccttccctcttgtttcatttatgaccttcctactctggtaagtgaggcagagtgagggagagagaaaaatgcttcttcatttctgtgtttatgttttttttatagggagaaagtccctgattccactctgacatagttgtttctgagcgtgtggtactcatggttttccttaatattgatattcagcttccaaggtcctgtcttcattgagaatcctttatctacgttggactcgtcagctgttcaggtgccacagaacatccattatccttcacatgaaggcatgaacacctctggagtcttttctgacatcctgtgagtgtcccatggatttgggataggttgcacccatttttcctaggcacactacaccacattctctgcatacatgagctgctccaccaattctccaatcttcattattctccagactacaaccaagcatcagtctctattatgcctgttcctaaatgccaggtcttcccaggcacaactcaccaggctgtcctctgactttctgactgtagtaaggtggacctgagttttctacagctaagaagcctacagcagaagaaatagatgcaagtctttccttcttacaggagccccagatattaactagtgactcatgggtgtcaccaaccaatttactttgaggggttgtgagtgagaagagggacaaaatttcaccagttttttctctgctgtcttttcccgcaagttctctcatcaattttcagtatacagaaggagaggatagattgttgttggtagggcctgttctgctattttggtttgcacaggtgatggtgtctgaccttcatcataggtgactcattagcgttgagttacttagcattttgactcagctttgggccacaagaagataccctttcaacttcatggagcagatacaagaatcattctttatggcaaggaaggggtaaaatgactaatttttctgaagatatttataaagactcctcaatccctctttcactcactcccttgcttcacatagcaccttgctcaaacttagagctccttgggggttttttgcttgattttttttcattcgtcagccagtctcctgatttgtttctgtattctctcatgcaacaatcacgtgttgagctacttctctgtgcaactggtctgcaagaagatgacaacacactgaacaacaggactgatagagcccattgagggagacattcacaagtgcaatgagtgtgatactagagaagtagagttctttcagatcaggagctcctatcactgagacccagcctcgtcaaggagcatatggaaaacttctttaggaaagtgatggttaagcagggacctgaaggataagaggaagctagtgaggcaaagaaaggagcaatcatttctagactaaagaaggggcatgttcaaaccactgaaagaaatttagtgtgattggaatataaagaatgagttgtgataggtaatactggaaaataggtagtggctgaatcaaacagagctcatagttcatatttagaatgaaggtaaaaatgaatgaataagtgaaaagatgaaaaatgaacaagtttctttcaggcacaaatctcctcaaaagtatagacaggtcaggtttagataatgatgcttccaatgggaaggagagtcagcctacgttctccactattctctatatgggacgtgagggtagacatttgagaataaataaatgaaagggctctaatagggagatggcctttccttcacttgtgtttttcagctataatttaatgatcccttcccttctctagccctccttttgctttatttcattctgtctttctatgtgtcttacccatctctaacctctgatgaccctgaccctgtgctgattggttttgcttacccataaatgtaattttaattcttttgagaaaagaaaagccatagtcatttagtttctgtttttcccattagggctctctttgtaggctctacattctttgtggaaacatacacactgcttgaagtgcttatattttattgtgtggatatcaataatccaatgatgtcttttctaaaatatctgcccttttcctctgtgtaccatagaaaaacattaggcttgtgccaattcaattgccttgagttagtgacaacatgcttttctctgctgaactgaaaatgtttttatcttaggaaatataactgaagacatcatgtcactgtgtcacttttgaaggcacaaatacaacttagaaacaatatcagcaaatgcaaatcactcaaatggcttgtttctaaggttatgtcagggaaacggccttgtctctaaagggtcaggatgcatacagttaagatttttctgtttcgcaagtctgacagtctcccacattggaaatattggatgaccacacaaggctaatatcttcactttcctcaggggctttattatcccctgtgatttatgaagcacctttggtgagatgacctacctctgtttcatgaaaggaaaccagattcagatctgtttataatttttaacctgttttcttgtgtatgcggtaccacttttgcacctctgttaaacttcttaataaatcaagctctcctaaatctttctcctacctccaggtctcatagattgatagacctcgtagaatggactaaggtcttgctgtaccattgttcaagctgaagatttggcttcttttcattcttcttgtggttatctaaatgagatctaactgaaagcagccaaacagccaagtggcaaagttgaaaaagtagttaagagagagtaatgatgaagatgaaaataaaaaagatttttataataaaatattgggcatttaggacatgcctggtaaaggctaaatgatttgcctacgttatgctatttaattctcacaacaaatcattggggtaaatactactggttgatgaagaaatgcactcaaaatagcttaataaattgaacaaaatcccacagatcttaagagacagatctaggatttaaacccttggttttctgattccattatgccagcggtaaagaattcgtaggcatattatatgggtcctttaatatttttttttcatttaaagtagttttacatgttacttaaggttggaaaaaacgcattatactatacaacttcttacaaaatagaattgtggcccctatctttctcctactttctatgtggcattagatatggcagataaactagagatctcacttcctcatctgaaagcattaagggcttgaatgtctcttttcgaaataaatgactctttaaaaaataatcttttaatcagtaagtatatttatacaacaatctatttcgttagtataaggttgattactcttgtaattatgaagtaaactacagactggatttcataatgatgtcttcagtgtgatgtcatttatcttattacaggatttgactatgagatgtctattccaatgaggaagacacaatacataaaaatgcctccatctatctgaaaatacagacattccaaggaaaattaattcctcctcattttatatatgctactttgtagagcttacctggtccgatgccaactccccaagtatcaccaatgcaagatgttgataaagcaaagatgagtttgttgtgcaccctggtatgggagaacactaccttgggagagttttggcagtgtttctgaagagagacaaggtcgaattttattgagaatctcaagtttgttttaagggagttctttcaatgaggggccttgattaggattggataaagatcatggtataactatccaggattgatggaaacagaaaggcaagattttgaggtgaagggtttgcacagtttcagggtgtgaactgttggttgatgcttcctagtgaagagttggtgggtctttcaggaagttcctttaatgaactatcaagttatttgcctagacgggagtctcctggaatagtaaagatatgctgatacagacagtagcatagtaaagtcgcattaatgtagacagtatggtgtgggtgggaggtaaggggtttcattcctcagtgttcaacctgcctgtggaggtaggtggttttgttttcacatcatgtagtaagaaggttatttaagtacatgctcatctctaccactggagaatgaattcttccacagcagggctgccctcctagtcatttgtgtttctccaccaatgacttgtgtttctctacctggaatagagttaagtaccacagtagtggaggttggacggtattggtagtagtggagtaaatggtgatactgtaatagcttttatctactgctcacaccccacttgccagatgacccactaggcacttcctggtgaattatctcatctactctttgtaacaaccatatgggcttgcttctgttttcatttctcagatctgtcataaagacagattgttttcattgtttaataaagggttgttacagttaattggacattctttcaatagattatattatgtaaataagtccactgtgtttactgttattcattccaacacaaatattaacatttccaacatagttgcctattaaaagctcagagagaactttagcctgttatagtcaacgggtgtcttatagtaaacataagaaactctttaacaaatattttcttttgtcagagttctaagtacagaaaaaccaattgccatttgatccccgtgtttctttatggcctgggcccccctgaatcagactcttgaatgaatttccccctcactggtggctttgccaactttttaagtctctgctgccacactgtggggaaacaaagtaaaacattagattcttagatattcttgtcatctttttaccaagtagcgattgttatttgcagtgcctcaaattcaattaaaaaacaagttacattaaagtagaaagcttttagacaaaggacgatgttaagtaaagtcaatacaaattgagagagtgatggtaccattattaacagctttgctttattgactacttgggtaatgagctcaattcaaaacgtggtcactctaagagaagcagtctggtggagtgaaagaaatatgagctttcaattctgattatatcaaggacacaaactttcttcctccctttcttgctttttttcctctttctacccttttctttccctattctactgaaatttattgagtatctactaccctatgctagacattatgctgaatgttactaataaaatttcaaagtaggctgtctttgaatctcaatggggacactctttagtgataaagaaaggtatataaaatgaaaattagaatataaagcaggcttgagagagtaatgcacaaggtatcatgggactctaaaggagcagctttcaaagccacagtttcaattatttgcagcaaattttgatactttcttttctgagaggcagaaatcccatcttccaatgacttggtggctactatctgcagctgccatgcgctcctgttatcctcttgacaatgagcgtgatggcttgccatctttggttgaacgcaattgaaatgtataaggattaaggaaagttattatcaaatagagcctctctctataatttaatcaatgcatttcaaagtaattgaaagagctttagatagaaaagtggagatcttttccaccttctttagaaatatacttctttttgtacacgcgtatttcatcatctatataatgcaatattggtatttttctagcttcaagcatctctgggaagcaacacccaagaatgagggcatccaccaaggtttaaagatagaatgcaaataaagaaagttttgcttcaaagagcatacaaaaaggcatgataatattcaacctctacttttttttggtcataaaaatggtagctatgtcctaagaataacttttatttattatttctttaatatactgttaccaagtatcaagtgactagaaatacctatatctatttcaaggcttaataagcctgggaagccagattaaagaaactgtgttagttggggagattaaatgagggaagagtgtgaattaatatttgttaagtgtatattattcacaggcctgtgccagacaatttgtatccattagtttattcaaacactccaaaaaatggagtcaatatgttaggtccatttcagagatgaggaaactgaggtttagagaatataaacaactgttcaaagtctagtaactaataaatggcaggacttggctaaaaccagacctgtgatgttccacttcactatcagaaccaaaaggaagcatttaagtagctacattcaagtgaaaatgtgcattgtctaaatctgcttgagtttattttcagagtaattttggatcagtggtatcaggaggataagtacaaaggccttgttttaaaccatatgaaagggtattcgcttatctttgaagtgcatgcttttttattaagtccattttaaattaagccttcttggaggtgaaagaaagctgttagctaatttaaaagttaggaatgtatcgagttcctttgaagtacaggtttccagagccaaaattcattaacattaatttaatgggaaaatcaagtcagataggttaatgctaaatcttttcatgatgagaggtagatggttgccgttcttaaacacaggtgagatttacagtccagtggaaacggaaacaaacaaacaaaaagtagaaggtggggagaatcacatttagcagcttgatttaggctccaagataagtccggcctcttaggagcagagtaggaacatactatgcaggttgttaaggtcggaacagcctgatagagggtgaggtttgtggcttggacagcatctcactttcctcctctttaatgggataatagtggtaccaggccataggattattgtggggattgaacaaagtaatgtatgtaaaactcttgatccactgaatgccttaggcacatagtacctccttcataaatgttaatctttattatcatccctacaggcaatggaattaagtagacatgatacaagttatggcattgccataccaagtctctaggagcaagtttatatcataatgggtatgtgacctttgtgagtaacttaatctttctaaggcttaatttgcacatgtgtgaatagggaacattaatcataagtactgtgctaagctgtcgtggggtcaaataaaagagtgtttgtgaaaggcgtttgtaaaatataaggagctactcaaatgctggttatcatcttttctatttctgttcctttttagtcttcatagaagtctcatctttaaattcattaatgagtcagattaatgatagtaatgatcttaacaacataagaataatataaaatatgcacattagctgggattaactttcctccatgaatactgaactatgaggggaaaacactctgagattagacaggtgacaactccgggctctgaggggaggacatacagatttacattcagtggagagaagaaaaatgagggttaaggagcagaagcagggaaggtgcatatattaggaatctgtttagctacaagtaacatagaattcaactaacagtgattcaaattagtgagcagatgttttcttatataataagtttagaggaagtcattttcctggtcttggatcagctcacagcaatgctgtctgagtcctaggatctccctgttctactgcccacagttttcatccccatacttactgtcttgtggcagcagacagctgcatcagctgtgatccatggtcaggcaggaagaaggggaagcaagggtaccagccctatctgtcccttacaaagagagaaaaagctttcctaggagcccctggcaaactttcttttatatctcaaaggccggagtgtgtgagatggctactcctggctataatcaacactgggaaaaggaatatttaattaggcacgtggctactctgagcaaaccttgagttatattaacaagacgtaagggaagagcaactgggtaggcagctagcagagcctgtcacagtgtaattcccagaggtgggggagagggggtcatttctgaccaaaggtggacggactctgtaacacaggaagcatgatggcatttccagtgggctcggaaccttaggttatttgtgcatgtgttttggggctgagaggcaaagagcatagtaggatagtcggagatggagataattttgaattaaaggcacggtatgaaagatttgctttaagtaacagtttccttgtaaactatttcttttgtaatcaatggaaaaataatacccatacttttccagtgctacatccttaagtgaaaatatcacattcttcctaatgcaaggtttttgccagcaaaataaatgccatctactctactctccaggacagatgtcgtaatgttcagatcctgttaaatgttgttcaagatagtaactgaaaaagaaaattggctaaagaaactatagttttaagcaagcaatttaaacaccttaagtttatagggataaaaagattccattagatgcaacctatctggtgaatagtaaacacattatagaaagcagttcctcagaaatttttaaactttccaggcttgcacataaaatgggcctggcaaactcgagaatatctgagaattgggaattgcctggtttttagtgttgctggtttcttccgataagatgatgccttttatcccattagttcacctttgtagagtatggaatcagcatagcaaagggacattgtaatgtgacactctacatcattttaaaaacttttactttattcaagaacagtatttgactgcagcaccacccagtgacaaatctaaaaattgcatgttattgtgttgggatggcatcttagacttttgaagactttgtctaagacacaggccatgggccatgtgcagacagtgagttcttaaaatgtgtctagttctaatcgagatttgctgtaagtgtaaacacacactggatgtcattactaatttttatattgactgcttcttaaaatgacaatatttaaatatttatggttaaagaaaatgtatgattaaaattaatttcacttctgtatttttatttttttaacgtggctattagagtatttaaaattacacaagtagtttgcattatatttctacgggacagtgctaacttagagacttaccttggtagttttgcccaggtagttcatttggtaaaagtatagaggtaaagaagctgatgttaaccgtctgaatttgttcaagagaacatgttggatcatgaggaaaggggacaagaataaatatatccaggttttctttgtatgtatacttctgaccacagcaaattaataatgttagtagatttatttactattaaattgcctgtattaagaacgcactagacattgtcttaagaagtctgcatttacttacttaatccccacaaaaattcaatgaggtgattactgttatttttctaattttacacacaatagagtgaggcccagagagctgaatgccttgtccaaggtcacatggctatgaagaggttgagtctggatttgaagacagtgtctctctggagtctacattcctaactgcactgctgtcctcctactcaagagaaaatgtggatgaaaaataaccaccatgttggccgtgggaaaatcactttaagcacatttaccccaacgttagacagtagtcacagattgttgctaaatttttagttatcacattcttattgataaaattcaaatgggtttaattagtaatgtagtcatttttaaatactgtgtttcaagttgtccattgattatttaacatccaatgcaattaggagacgccgtgaggatcctaagatacagaagagacgtgatatgccttttggacactgagggggaaatgggatccataaacaaatagaatggttgaaggatgcagtaggaaagcccccagaagagatggcatttaagcagaattttagaggaaagtaggatttgtcagacgaaaaaatagaggaaatccagaggtcccatgcataggggacaactcggacaaagttatgtgatcgtgaaacagcatgacacatacagaaaactagaaacagttcaagattgcttgagtttaaagttgtggggagaagtaaggatgttcgtctaatggggtggtcgcaaaggtcttttacatccccaggctgaactcagaaacgtgccagcctgacaacctgagtaagagaaaatgattctgtatggaagatgataagttctgagtttggtttgatctaattttttttgctttaatattgcaattttatgtgatgagatgaatgccctggaggaaagaaatctatgaaactacagtcgcagaagtagttcaagaacatgtgtctctaaactttgaatgctctgtgggccttgtgaagatcaaatgagttcatgtatgtgacactgctttgaaaacagcccagtgctatgtagatgtaggttttatgatgatcatccccttgcacttgaatcaatcaggtcatttcaaggtctagagcacagttatttttaaaataaaacttttggagacccttttttttaattattactataatgaatattttttaaagttttattggctacattacacaaagatgatagtagattttctgtaaggatttttgaggtcacaacaaactggttcattgatcttgactaaaacgaatggcaaatacagtaaaatggtcaaaaagcagactgagacgaattgaaataaatagtcacagattggtcttgtttgtgacttttttaaacggactttaataagcattgcaaatatcatttgacaatgtcctatatgagactcctccaatcattttcatctcaatttgaggaactagaaagactcagcttagacttgcctcaaactgaataataggtaaataagccaccctaaagaaagacccctaatttaggccagcaacacagagacaggtctccagttctaactgtcttccatcacaacagtgttggcccggggctggatacaaggaggtacaatatatgatgacgggtagattaagtcaccccagtgatatttaaaatgtagatctttgagctctatagaactggatactgagagttgtgcagtagaggtatgaggattggtatttctaacaaacatcctagatgattttaatgcgttataaagtttgagaggctcaggatcagactgtggtttatagatagtctgtgtaattgattatcagtcattgatctatgagattctcaccaattacttttccagaaaccaagagctgagagctgttgctaatatagctttgctcttagcgaaaacacagctagcatgaaatttgaagcatagctcagccaatgctcttctttcagattgatttcatcttgcctcagcgttctagggcattaaagctgaaccatcttcctgctgactcgctccatggccatttggcaaatcctttcctcagtcactttcctgtcatgaaagaagaaaactgctaaagaatagatcttaaaagttctcatcactagaaaaaaaattttgtaactatgtttggtgatggatgttaactggacttattttgttgatcatttcataatatatacatatgccagatcattatattgtatatctaaaactgatatgttgtatgtcacttaaaaaagaaggaaaaaaggctttctgttcttccatagagaaattccagtcgcttagtaccttttctggaaagaaaaaaatgatttaaatgcatgatttgaaatgaacagttcatctaagtttccagtttgaccaataagtagatgggtccattctgcatgcctgatatttgcagtgtgaagtataacaggctatgtatttcattataaaataattgctgtcatataattcctgatttcttatgatgattgaggtgtatgattatagttttgtttgcatgcttacatcaaggaagcacaggttggataaggtgtgtgtttatttgcttcgaatgcctccctccatccctaccccacctcccaagagccaattggtatgactgctgtgtatgggggaaagaaatattaaggagaggatagctaaaagagcagtatttgagacaagaagatacagaacaagactacttcttaagaaaatgatgggtataaagttacagctcagtttagattttgcctaaattttctttcccatcaaatataatattctttttaaaaagtgacgtctactttcttgaatgtcaaattaaaccaaagttaagacagtgggctggaattttatcagattaaataagtccctgttctctagaccacactaattttatgcctgtataatgagacaactggtatatgtgattgtaaaatcactttcaataattaaaaaaaaaaatgtttacctcggagaactcgtaaatatagattccacaaactgtaggtgtatatttcttacaaaaaattacaatgcattagcaattatgtaactttatacagagatccaaagaacctcttagcataagctaagggttatagtgagtcctgcattatgtgcaaaatgtaattgggcttataccttatcccagctttcaaagcttttgaataaggaaaattaattcatttattaaaagtaaaactctcatttctgaattcataatttattcctaaaagagtcaatactggagaaaagaagtagcagcattttagagaaagagaactcagacaaagttatggaggaaggaaggagtgtcgtggatttggggattatttaagaggaaagcttggataaatcagaaaatctgagttaaaaaagttgaaaatcttgaaaaaaatctcttcccactcaaaaaccaagatcctggtgtttgtatgttcttaagaaaaagactgacaatggcgaggaatttgataatttcttttttatgataactgtaaagtttcaattcatttaggtaagatctaacctattttgtgtctggttattaattctttcatgaaaagagatagaactcccccctcactcccttttctcattctagaccagcctgttaattagggaaaaatactcatttccattttgagcatgtatgagaccttgaaatagagatgaatgtgccctgttttcagcttcattttgatagtagagggatttgggctactacaatgttataattttcataaagaaaatgtctcctttatgctactttcataatttggatcttagtttggggatccagggagaactgggtagatatacttagagttatattcatcagcaagccatctgccttaggctgtagtgtgtgtgtttgcgtgtgtgtgtgtgatacatcaaattctctctctcagctacctatgtatctatctagagagacagagtgacagaaagacagagagagaggcagttatttttaaattttcagcaagggaaaattggaaaatataagaaaggaggtgctctgcaaatgctgaggcagtgctgatagcaacacttaagtttctttaatctagatgttcgtagataataggtctagatggttgtgtatgtagactgcccctcctagaagagcacatttctgcatttctaaaacgtgaagtttgaagatcacagcactgagttaaagtagagttgaagatcactgccaagcaggactgggagggctgctgaaaacctttgagaggggcaaaaccttcttcttcatttcgccagactggtttttctttttaacttttttcctcaatggtaaattgggaactatttaacacataaggttcataggagaaatggagacatctgagacgtgaaggagaagatggtggatgtgatggtcaccgttttcattccaataaagccaaagaaataaaggtaagggtatggtgtccctttccaaatgcagtgtctgtaacttttttcttacatgtgcagagtcatgaaaagttatttgttttccaattctttaaactgtggtttgctcaagttaggacaggggatgtgtctgtgtgtctgtgtgtgtgaaagagagagagggtgctagaaggagaaggatctaagaatgtatctgtactcggtccattactgatttaaaggcagtaaaatagttgtcaaactaattatttttcattcttaaatattctcactgactcaggcagaattcattattaaatacagaattctaacattttaggaaggcaagagaatatgaggttgtgtggcaagtatgtaaagaatccaaaaatacattgaattataagaaattcagaagttagagattagaggtcttgtatgctattattcccatacttgtacctcaaagacttttccttacttgggtctgaattagcaaagctttgaacacaggggttaaaaagaggaagctaagaaaaatatgaatcatcttgcacattgagaaggagtcaaaagatgtgactagtgtcactgtcattgggagctcatgatatataattttcaactctgcatggtcaacagttttgatctgggttccatgaatttaataagttttaatttgacaaggtctcaagtgagattttaaccctaaataatcagctcagatgaagacttacaggcagtttacataggactcatcatagtaacttttctgttgagtttgaaataaaagaagcactaatacttttaatttccaagatttcttttctttacataggattcatcatagtaactttactgttgagtttgaaataaaagaaacactaatacttttaatttccaagatttcttttccatgcattaaagcaggatttaatactgtgataaacttataaatctctaagaaatcaatgcccttacacttgcatgcacttaatgattgaattccatatccactccatctactttgtctaacaatctttctggagcaaggttcattgttaatattttttaataaatgttgaaaatggagtttattgccttttatatgttgaaaatgcacatcaccacaagtctttaggactgtggagcttggtaaaagataaataaagcccctcctcatttacagcccctttgcccactgagctgacctccccctggcttgtaaattctggccacttctccaaaaggtgcaggagctcaggtcagatcagcaacaagtcagtctcttgaagaccctggagaacttgcttcaagacagcttccttgttcagttgatttgcagacactgctctgtctttgagctaagtaaggggtgttgatcttcctcggtccctttgctcttagggttgaatgtcttatttaagccatttaactctcaaagcatactggggtttataagtctgtgtccaggctgctcagcagaaggaattccacaaaagaagcccctctctggcaaggctaacagccttcaggaggtaagtctcgctcatgcttccctcttttttatttcttctttttaaaagtaactaagtaacaaaggctcagggaagttctttaagatgaagtagctgaatgtgaagcttatgagcagtaggtttcagaaactaatgcccaagccgtttgactcctgaaccagtttctcacctatacaaacttcaaactaaggtgataaaagttaaaagttaagtgaaattggatcttggtatttccatgatggtgtcccagaagcctgcgtttccaagatgaacacagacacaaagctcttcagaaacattggaactgtagagattgaatgcttacatactttcagttgcttttgttgctattgatgtagttattctagttcttttggtttgcttcctacatactggggtttataaaggaatccaatattagtgactttgtgtgtgaacttgaatttctgaccatctcaaatacttagatgaaactgtaaattactatatgtgttcctgagtacttcatttcccaaaattttgaggataaaacctggtttgtgaatattcattcttgtgtgtgtgtgtgtgtgtgtttgtgagagagagagagaaacagaagttgagaaacaatttaatatattccctggaagataaattggctttttaaagtaatgattacatttatcaactctgaaatcagtgtctatgcatacataataatgttctattttaaaatgactgtataatccttgattttaataagctttctgaaaatgaaatagctccatcacactgtatctatgcctgtagaatccctctatatgctcaaagatataagatatactatatccaaattacttcccactttatataaacttatattcatgtgtttgtcaaatagatataattctaagagatttctctgaagaaaaaaatgtaatttattcaagtttttttcccaatgatttgttttatctttgtattatttatgctatcacagagttccattaattttgcactgttatcaatgcttatgtagtatttttcaagagttatatgtagaatagattttaatacataaaattagaatattgtgtagacttatgagtaagccagtcccacatggaaacactagttgtgttgcttaaggagcaaagaatatggattgccctttttcctggctatgagtttgccaactaggttttggtatctgttttcttgtgaatcagagtcactgtttgcttttttgacagttagtgtgccctgtgcttcattgtgagacagaagtgtgtgatccgctttactagcacacccaccacccatcggctctagcatcccttatctgcacagttgttattcctgagaagctaaatcccaagtcgttaacacaaactgattttgatctcaatggcctctgctttcaaaccattgtaacagacactaagtgaaaaaatactgtctatctagggactttttaacttacaccaccaaattgcctatctgtttactaattctgcccctcgtcctctgccctgtctctgggtgaactggttaaacgtatcagcatatctcactactgatcaacactttgcttgtttatccatcagtccattcagccattaatttatttggttgtttatttaattaattactttatatatctgtttcaataaaaatgttagataagttatcagaaaaaaacggaattaaaataataaatcataacctgtaaaagggacaagagaaaattcaagagtgaagtaacactgacaggaaaagcgtgtacagacagcacagcgtaaggccttgacctgttcttagggctggggcacatatttggctctgaactatctactggccaaagacaatttcgtagttcttaataccaaaaggaaaaagtagtagctccttggggcagccataatttttcctaatagttaattcaaagaatattctttcaatttatcttcatatagacagcctatgccttcaattgcagatttgaaacttctatttctgtcaacagatgctatccaggtgaatttttttcctgaaaaatctcattctgctagttatcttttcaattttaaagatctgcagttcccttttccctttttaaagtcaagatttgaagccaagcctttctgaaaggtcgtggcaattcaagaatccgtttgctgagaactgctatgtgcccaacattgtaataggtgccggggatattattgtaggtattcccacacccaaagagtttttctatatcagtgcaggatttcccacagaatgctggtatcagacgagttagctggtagatggacaaggatttctttttgttgttgtaattattattaatttttaggataattttggactaacttactaatttatgatagttacataagttttctttgaagcaaatttacataactgaaactgtgagctgatttagagaaacatgttcaattacattaaaggtttaggagggtagagcatcaggtttgaatgtggtgcaactaatggtatagtttgagacatactcttcttatagaagaccataaatgtgaaagactcatgacagtaaagaggatttattgtaaccatggaggcatggacttgatatagcattagtgaaaaggtgtgagtaaaaactgggtggagttggagaaggccacagagaggagacatttgagcctggacttgacgaatgtgtagaaattcattatttcaagaagggaatacatttgggctgaaagattgtggtgctaaagctagaggtatgaaatagcatcgcttaaaaaatcacaagtaacttgataaggatggaaaacaagagtcatttagagaaatgacagagggataataatcatcagagtcagctcttactgaagcctaactgccaagcactgttctacatacgtcctgtgtaccaagtcacttaatcaccctgacaatcatatgaggtgtgtattctcaggctgtttcattgccctggtccaggcagtgcttcttacatcatagttcatgtgaatggtgtcccacagaattcaatgtctctgttttgaagaaaagaagggggctggccccatgggcaagtggttaagttcatgtactctgcttcagtagcctggggttcaccagtttggatcctgggcacagacctacacactgcccatcaagccatgctgaggcagcatcccacatagaactagaatgacttacgactaggatatacaactatgtacttaggctttggggagaaaaaaaagttcgtttaaaaaaataaaaaggtgagaaaactttagcacaaggaagttaaataacttgcacaacatcacatagttgtgaatatgaaggctagttttgaacacaactagtccactttagagaaaggagaggtgaccccttcctcataccctttagaggaagcctggacattatcctccgggcaatggaaagctactgaaatactatgagacagggaatacaatgatcagattggcacttagaaaaccaatctggctacagtgtgttgagaagattaaagtaggatgagcctggaggcagggagaccagtcacagtggaccagtcaaaagctgatgaaacccaaaccaagatcaagatggtggcacgggtttggagagcactgttgccagagtcagacaaggctcctttttccctcagggctaaagaaaccaggcttactgattcagtgtctccaggctgagctgtcccactggactctgcaacaagagagaaaatggttgatccactcttgtcatatgccccctgtttggtcccagacttttctttttgattcttagcaacataggtcagcccatcttcagcaccaagacatctctcctctctttctcttattacctgaagttttactcccaactcctgagctccttccacaggcacaaacttccatttaaagtggaacccaaagctattagatggtgtggtagtataaaagatatcttttctcacttgttcattttcagttatatcttgatgaaatgttttaatctttttgttttagcttataacatatgaaaacattaatttatcttagaagtgtctctcacagagtgacctttgggaaagtaaaatggtgtattgacttctgaattgtgtagggatccagtctgcaccagcaaaaagaaatgtcggtgtttaacaatgttaccactcctaatactcatcacacaatcctaaacctctccgtgatccatcatcaactgaagtcttaacctcaaggttgtttccacattctgattcgctccaatctcctgccttcttccaacctcaaaaagtcttccattttgtccactggatctcagaggcagtccttggcaaagtcccttaagtccacacctcttcatgttcctctcagtttcctcttcagtcttgccaaatggtgctgttctcaccaatgtcacagaatgagtaggtagggtgagtgtcttccttcaccatgattgctgctttcaaattttgtccctttttccttccacaaaaaccccatctgcttagagacacttgttccttgagttccctctcccccagcgttggtgttgagatcctgaccttgttagagacagcatggcagtgattccagggaaagcggttcaggagtatctcatatactagtgagcagtatctcactggagttgctctactacagaaatactacagaaagaggggtgctggagggagctgctgactgctatgcacaacaggagcgtggtcctggagaaatcacatgtaccatggaattctatcaagtaagcacaccagaagcaggaaggcaaaccccttctgcctataatgcctatccagtggcctctactgacaaatcttaacatccagacaacaagcaaaggaataatagctaaacggataagtttaattttcaaagatcagcagtaaagggtgaatatggagctgagagtcaataaataaataggtagaacacacacaatgtgtgtgtgtgtgtgttttatagtttactgaagatttgtaacatgctctagtatcttttgctaatgtctttctttggttatctttttaattttgtttttattcatctacccacttgttcttccaggatacattattatgtcagggtcaaaatcatattccctcaggatattttaattttaaattgtgctaggtccataaattaaggagagatttgttaactttgccatgttcatactgcccagagaaatatataacatacctctatattcatttttgtatggcttactaaacttttgttgggattttttttgtagaaagctttcagatttctacatagggttattcctaaatattttaaattttgttattaatgttgctggtggtgaagttttgcattgtatatttaccccctttattgtcatttttatattttgttgtcattggcatttagaagattattaactttcaaagtcaatcccttataacttctaatagatttctagttaagtctcttagactttaaagcccaacactcatattaattaaaagtaattgtgtctcctatttgtgttctcatgaatcttttaagactgaagcaggtagaatggtattgcctagctctggggcagagtaccagctcagtgacatacaagatgtttgatgatctggaccaatttactaagttgctatctcatcttcaacattggggagtaatcctctgtatctcatgaaattgttataaggattaaaggaaataatgtttgtaaaattcttcatacagatcacataataaatattctctttaaatatttcacaggaaatagaattaactttttctgttatctttatattcgggctctagccctacagcacagtgttggagttgctagacaagcctccagagctccttaagaggttgcctaagtgatcatttgaattcccatccaccctattaacaagaagccaaaagtctttaggagatggaatttgttactatggtagtaagttttaggcctgctgaggcaggcccttggcttttatcctatcttctgtaaatgggaagggtgtgctccatccaagcgaaagaaggaattttcgtgggatcatgtgaaagatattgtgttgtctggtagatgggcagacaggactcttattacccttccagaaacttgcttagtaggagaaactcaagggcaaatctagtgtactaatatggagtgcaaggatacagttattaggagaccttaaaaatgtcctcaggagttagaggtgtgcatgcacataagcatagactggtcctgctttctacctggagaattttgaaggtggatgactctctatagagcttcttgtgatgggagagcagaatagatagggaatgtggtagctgaagctacctgcatttcgtgccccaaggacgtattgctttcccatgggcctagaggatgccataaaaggtagtcacaacctatctgatgtgacctcaactaagagggctgtctctaccagaaaaagagatcccagtgtctagaggctgttgggtagatttgaatggataggaggtgcagtagctgagaccggaggtcagccaatgtgtacaccacccatatctgagaagagcacactacaaatggcccagtggggactccattcgtttccctgtagagagccagaatttggattcctcacccaaagaggaactccaaagccaaaggagagctctaagcagttacttgtaactaaaacacttgttgcctgtttattctctcctcaattcctctcctgccaagactttgaagaaatctgaagtggcagagtgagtaggtgaagaggtaaaaggaagagaagagtgaagacagtggtttgctcaattctactgtagctcctcaaggttgagagaaagtctgagtggggtctccaggggagaagtttgcattggaggataaagtgtttataaggctgaattcatacacgaaattgagtcttgaataccaaaagggactccttcttaaaacctatgtgaccctagagcttgggatgatccccagatatcatccagagatgagaaagagataccctacaaaaaaatttaaaggcagaggttgaagaaaagtacatttattttctgttatacctcaagaaattaagaccatttaattaaccagtcacacatgtattggctcagtcctatgaaattacaaaacaaaaacttggcagaaggactagtaacatatcaccactaatgatatttgtatatctgctcaaggaaatccttgaggaatgaaataataaaatcacttctatctatggatgtattctatttgctgattttctagttcaatcttttttgtttagttatgggcatccatataagatggaaattatactaattggatttcaactgaaaagcaaactttctatcagacactcttgttcaaaatcacaattagttgcccttagatacagtaggtaacctatctttggaggtaaaatggccacttctaagaccatgtgcccaggggtttaaaaaaaataacttttatccagtgagtctgtaattctcccaaggtacatgatctttattcttttcatttaatcagttactgccctacatccatattcctccctgggtttttaattggggaattgctggcagtttaactatgaatgtgttatttaaaatagcacccaggagctggccctgtggccaatggttatgcttgcaggctctgcttccatggcccagggtttggccactttgcatcctgggtgcagacctagcactgctcatcaagccatgctgaggccgtgtcccccatagcagaactagaaggaccttcaactagactacacaactatgtactggggggctctggggagaagaataaaaagaaaagaaaaaaaaaaagaagattggcaacagctattagctcagggccagtctttaaaataaataaataaataaaaataaaatagcatcgaaacctacagcaaagtgaatcttagcgtattagttaagatgacacttagcacattaattaagacaacactgatataacatagacatccccaagaggcaggcttgtcagaacaaaagtttatttctagtcctttataaagtctcagtgggtgtttctgataagcatagagctctatttcaaatgtcgtttcagggacccagttttctttgatcttgtggatctacaatcattagcacatggcttctaaccaaagttgttgccaaaagggaaaaagcatggaggatcatgctaagaagtttttatggtccagacccagtttccgtcacttccaccagagtctgctgattgctatttattcatgaggccatacctgattgcaaggtacctgagatgtgttgtcttgtcttgacttgagtctaggaggaagacgagctaagactggtcaacagctggccaatatccgccacatttagcatattctatctacattcaaactatccttcctatactcatgctttttatttaaattgaggagtgatggggagactttccacccccccgcccccaggagctatttccaggcctttgcacctgctgttctttttgctttgaataatgttcctgttgaactttatgtctcagctcaattgttacatcttcaattgttccttttcttacaacgccaaattcagcaactttcccacccattcagacacatgctaacacatactctatttttcctcattctaaacgtgtatgtacagaagtgagacatgggaagcccatgataaatgctagttccttccatttgcctcagcctgtaaactggcatttgtttctgctctaagctaaaaaaatatgttttaggttaaatcaaaacattttcttacaaagagcttttctgatatttaatagagaatgtgcgtgtattgactttttaaggtttttcagaatgacttttcatatgaacttaatttatttgttgggaattctgtctcttaaataaaatatataatgtgagtattggctgattcatgtttctaagtttccaactccattggtagattttttttgcccttcagccttaatgccttggaaatatttttatgtctcttgttaagaggaaaagtctttatgtatgtgtgttttggggcggggatggagtggggttgggagaaggcaagcaacagagatttatgtgcttcaggaaagtaaggaaatgcattgtactggctgacttatctcctatcaaattcaagtgctagaagagttctcagctgctattcaaatctgtctttcttcaaataaggaatatagtcaagctaatgttatcttctttttacgcatgagctgtcagaagcttggggagctaaatgacttgccaaggcttaccaatccaaacctgtaagtttataagaatggatctatttccaaagttctcttttaagtacattgcatgcctacataaaattaaaaatatcattcaaagcaaaaaggaaaagaccactttccatgtattccatactctcaaatatttcatataaaattatgcaaaagttaaattaactatttgaaaaataaactgtagtcagtcaggaaattgaaagtctcactaaacttgtcaaagttcactttttttcccaatcaaagaactttgggatgtcatatttttctccattcagtctggaaggatgtgtcaaaatttcagtgttcatacagttcagctcattttatgaacagtttgggaataaaaactcccagtgatgaaagttgcccatgtcctgcatgtacagagacctagtgacatcttttaattagagggcaaactcagacttatctaccctccaggcctttgcatgaccaaagcaatttccaaagatggaattgcctgcagaaaaggaaaaggcaatgaagtatattcttgatacatatgcagaaattagagtacaactcaaatgcttaataaggtaattccttaggtatacctctctgaaaaataaagatgtaagatgctagtgacctactcgttaatgggacttcagaataacaggattaatgaaatgccctaatacaatttattttcatcataaatttaagtcattgcatatggattactgaattacctatgactgcagcaacaaaggtttaaaaaatgtcattgggaaaatcaacatgccaaggccccaccgtcttaatcagttggaaagacactgagttagtgctggaggggatgtttttttaactcttggttcacaagccgtcagtgtctaggattctctccttttctttgttctatttattcaacatgcactgagttactgcgtgttgacaaatacaatgccaagtgctgatgatccgaaggaattaaggcacggtgctcatccttatagacctcactctctagctcacaaagatataagcaaataattacaatatttgctgagaactataatagtatgaacattctattgtgagatctagatgaggaacccttacctaggagctttaggattcttcgggaagacagctttgttttggttcttgaaggacagtattaaatgcttaaatttagccaaatgcatttaatttcttttttttgtaagctttaattcatctatacttaggcttttcctcacaggacacatgtaaaacccctgagaagtactgatgagaccctgtgcccagatatcatcaattctctccttgccatatatagctggattctgagatcccaatcttttggccctgcttctttattttcagtacatctcctagcacctgactgtttaactgatcattaggatttttatttgtctctgctttcccagtatgagaagttgcctactgccaacactcatattctctgtgtattcctgtttccatttgactgtgatttattgcttcaattttactattaaaatttacctagtcaaaataacattaattcaagtaacttcttccatgttgtttatcagttttccaggatctacacctaccttaatatagagcttctttaacatatccatatcctctgatttccccttgtttaacttttcttgacattatctctcctccttttcccacacaatttcttccaggttcaagaaaacccaaggttataaatgaaatgaaatttgaaaaataaatgggctatttctcatggaggtatgggttaacaattctgatattgctgtacattcatgctggaactgaacaattacatgtataatacatggtcgatgatagagccaagttactcacttttgagtaggaggttatgtataagcaaagagaagtggctggaataattcatgtggtaatggattacagtcagacatagcagtgtaaactcatgtttagctcaatacaggtacaagtagctaaatacagaaatagctatagatgtggttgtatacacaggttaatatacagacatgtagtctattctctgtcagcttagaaggcctagaggctatgacaccccagcagcaaccagcacatctagggcccagattttggttactaatacaattcttcaataaaaggaagcagggctccttggagaaataggactaagaccgaggcagaacatacacaagatgagcctggatcatgtcaccatgccagaaagtagggaaatactaaattaaaaaaaaaaaattcctataatgatgtcaaagggacacagcagccaactgaattagcttccaatggccaaagctagcatcatttgagcaagaaataattaatgtggtattttattacaagccaaagtataaaataaatacccatgagtacatgctgaaataagtaaatgattaaataaataaattcatggaggagaatggacaaatctccatgcagaaaaattccaaataatttttgtagcttctctgccctcctggagatggaccataactcccctttccttaagtgtggctgcacgtagacttccttcctaggaatacagcgtggaaaagggggagaaagattagctttacagtggagaaacctaacaaacaccactccactatgtgattaaggttaacatccacagtgataagtcacgttgatacagtatgcagccttgatagcatatgatgaaaatggcagttgagctctgcagacttcctgcagaggaaaatctataactgtagtctaatcatgagaaaaatctatgacaaattccaattgagagacattgttaacatacctgagcagtactcctccaaacagagaacgtaccaaaaacaaggaaaattgatgaatggcaacggccaagaggagcccaagtagagatgacaagtaagtgtaatctgatatcccggatgggatgctggaaccaaaaagtactttagagaagtaacgacatctgaataaagtatggattttagttaataaatatgtatcaatattgtaacaagcgtgccaaagtaatataagatgtaaataataaggggaatgggtgtggtgtatatgggaactctctgtactattgtcataatttttgtataaaataaaactgttctaaaatttttttaaaactttatttaaaaatttaaaaaattgtctagttgataggaaatgatataatgggaggaaagtaaaatttgaggagaatatttagagtgagaatttggttaacaccattaagaattattgccctaagcaaagtaaagtttttagaaaagaaaaataggttctgctttctcttaataattttgagtactccatcaataaattgcgtagagctagaattacacaaaataaaatgtgagcaaaactcccaattccactgatggttctggagatgaatccttccattccctttgatcttggggactagagagataaaacactaaaaccacataaaatacattacttatttcttatcttctgtgttcagagcatctctcaatttataaattcagcttttatcttggaagttgctttggagttgtggaattattaagtctgtgccctaatccaagcccaaagcatatttctaagtctccacactgcctgcagctcccatgcacagcagggcaagaggaactgaataattcactgtgaaaaagagaaggagacacgcatcaagtcggtcctctgccatcctgtccagcagattctttgtaaccataaaaaagcaccagagctaataaaaaaagtaaatagatgcagctcatttctgctgccatgtttccaggaggctgttctgagatggtcgggtatgtgaggcacagtcatggagaacatagagagttgattttcctggaattgtttatgtgagcttccttcctatgccgcaggaaaaactgtaaggtgaaaaccaaatccaaggcctggcccagctgtggaaggcagcagagaactttttccaaggggaacttttcacaaaactagtgactgggaacaggcctgaccagcctccccagttttttcttcatcacttgttagttacatggctattaggagactatcattttttgtcttggatactggggcttcgtgaataagcaagactcaattcttgctttcaaaggggtgaaagatagagggaaatgtgacaaataaacaattacaaatactgtaataagcaccacggagttttatacccaggagcatagaagttgcagggaaggagcccatgattcttccagggtgggagaaggggttccacagaggatgccatgtggcttttaaaattatcggtaacaactcaaagtcctagaaaagtagggaggagatttttggctgaggtgacagaatatgccaaagcatgaagttgcaagatgatttaaggaattgagattagaacagggccattgcaagtggcaatttcaagttgcaaagggtctgaatatggggtacatgtaaggtgtggtgcacatgagagtggggagtgggatggctggcaggagatacacttagatgacaaaagccaggttataaatcgtgttctaggccatattaagaattttgaacattagacagtggggagtaattgaatggttataaataaagtgttagcatttaataatttaaaaaaagtctgataattgtgttacttgctaacactttatttgcactgccgcaaaactaatgttgcagtattcatccataatgtttaatagtaagtgctgataggggtgttttgttaactgtaaagattttatagccgagaaccgcctcctcgctaattaatgtgtgacaagacaactaacagtgctttcaattcatctttacttgcccttaagtaaatgttctataatatcaccaaatgggagaaaataaaattaatatcttgcacatcgccacgcagtagaatatctctctggaccttgctatttatttattcaggaaatatttattagatatctactttgtatgagaccctctgccaggagccgttatgtcaagatgtataagaagagctctggccctcagtttggtagaggaacgagatgagtaaatgaataagcaagatgagaggttaaagttgtgagagttgtttggagaagggacagtgggagtatgtagaagaaagaggtcggttttaccttgttgtatgtgccaggattaggccagaagacaccttttaagcaaagtggattttgaattgagtctcgaatgctgagcacatgttcacgaggttgatgggggagggcatttctgtagggcctgtagtagtttagatatggagatgaagacgaccttcgtgagtttaggagctctagaaggctgctgagttcagttgtgcagcttctgtgcaatacctccctggaaggtacaactcagcgtcaaggtctgtaagaatgctgcccctcccgcagtacacaccccagtgaagctgtgcagtgtacaacctagacaactttacatggcagtcctgaatatcaatttagtgtaaacatggtatgtaattggttatgtaattaactgtaaaataggaataacagtacctactccataaattggagtgagaattaaatgtgtcaattgtatgtaagcattattatatatgttatacaaacatcagctgttattatgagtccccacccagaactttagacattttatataggcaaattcatccttttcctttttagtatatgacttataggtttaggctttatccacctcaatattataaattattattctactttttcttttaaagattggcacctgacctaacaactgttaccaatcttcttttttttgtttttctgctttttctccccaaatccccccggtacatagttgcatatctttcagttgtggcatgtgggatgctgcctcagcatgacctgatgagccgtgccacttctgcgcccaggatccgaaccagccataccccgggccggccaagcagagcacacaaacaatgctcgggcacagggctggccttcttctgtatttgtaacattagttttttcaaattgatctctagtccatccgagaggtatgcgtaagtagaaggtcagtgaaaaagcaaggggagagtctgttacctacatgaaccaaaggtgacacctcctattggcgctaagttgtttacctcacagcaggcggggatgcatcagctcaaaaggcccccagtgcccaactcaaactgttacccagttgctttaagcatagccccgggaagccgattttgcaccatttataggctgcctgctttgtattccccacaatactgcacccacctctgcaagacagagacaagataaactccaggactgtaaatgtcaccaagccccagctgctcttcagactcttcagacccccagcgctgctgagtgacgtcacctgcacggacaacccgtctctgatcccctgtcccccaggagctccattgccctccttctcacttcaggtagtgggcctgcaccactgcctctgaagggtctcttgctgagggccttccccctccgccagacccatcaaagcactgccccaaatcaaactcatcctgtgctcccaccgcttttctggtccttcctttttccttgatctccctccacataccttgaactcactgtaggatgtaatattttaatgtttcttttgactatctagtttttcctgtgacctttattgagtagtttatactccctacagtaatttttattttccaaatatctattgctctctttcagaactttctactccgttccaaggatcaaattttctacgtttatatcaggaccccaccctgtaaatattgttttggtatctggtagtacagtgcccttcacattatcctgtttaatttctcttgctttttgcttggctttattttattttattttatttatttatttatttttttaaaagtaatccagattttctttttttttttttttttaaagattttattttttcctttttctccccaaagccccccggtacatagttgtacattcttcgatgtgggtccttctagttgtggcatgtgggacgctgcctcagcgtggtttgatgagcagtgtcatgtccgcgcccaggattcgaaccaacgaaacactgggccgcctgcagcggagcgcgcgaacttaaccgctcggcgacggggccagcccctccttggctttattttagcaacccactttttatatgggctgtcatatgcaataaaacagattcctcggggtttcgtttggggactatgaaaaatttataaattgcttggtggggaggtaactcacatatctgcaatagtgagtgtccccaagtaggaatattttatgtcttttcctttaggtcttctcttctcttctccatttatgcttcataattttgaaaataagagtcttcaatttttaagtaggcttattccactttgttttatagattttgttattattataaactggatatttttatatattccctatttgattgttgctgaggtatacaaaattatagttttttcagtgattttggcccttaccactgtattcaactttctcattagttctgagtttttcatttgcttagcttgatatgagcaagtattcgaatcactttagtgaaaatgactgcttccagtgagtcatcattataaagtaggatgttttgatgaggttttcaaattatcttttatcaaattaaggaagattctttatttcataacctaagaatttcttttctattttcttacagtttttcttctttagacaaaatatttggcttttacttcttgttgttcttacctgtccctgactgttttgtttgcggctttttttggtatcagagttaggcttagtttgtagggttatgtgaattgagaaattgctcatctattcgttaacttaggaaatagctgatttttgaaaatttgatttcactttcctgtaaaaccacttacccaagtgcttttcttaggatgcaacaggatgtgaataaatgactactttaaaattttcttttatggtttgcagcctgtttggtttttctaaagtttttgagtcaattttattaatttatatcttcccataaaaccattcatttcaactacattttcaagttgaaccacttaaattgtaaaattgttaaaatttcctcctgtccaagatctgtatactttcttattcctaatattatttatttgttgttgttgccatcattaataatttcaaataactggctttttaagttcaatttttctgagtttgttatattttatgttttattaattactttttccatgattttcttatattttccttattttctctacattattaatttgaatgcttagtttagttttagggtttttgcaaacgtatgtgaaactatatcttacattgtgaatgaattgttttactcattgtcccaaaataattctttttttggtaagatttttattttgtatgataagcatgttgaggttacatatagatgtatatatttacatgtgtatatatgctgtacgtgtgttttcaacctgacgctcgcaaacgtgtgtaagcactatctttctccatagagccatccctggttcacgtattcctcccttcttaattcctacagcttttacagtcttagccgcactacccacactcagtattaggtctcctttaacatgcattactgattccacatgagtcttgctttttgaggacacgaaccgggtcagacacatctgccttcccagtgtaaagcagatgcccaaggctcagcaaattgtttctaatttatcatcattatttactatgttctagtatatgagccttacctttaagtattttctattttccttttcttttgttcattttgggcaagtggcaggatgagcctggataatgtcaataacaaggagttggtaagagtgagtgtcttctggccacttgtgccctgcagattctggtcctgtccacatttctatttcttttaaatcacagaagcttatggaaagactcagaggtctacttcaaccatctttaaaaggaaatgctgaggccctaaagatcatctgctgcacctaaaaaagtaactggcatgtcatagtcattatttatttgtggaaaaaatgaagtaatgtggaccctccccctttcattttaaaattagaaagctgagcaaggtaggtggaaatgttggaacttgttcaagttacctgattctgaaatccaattctcttttctctatatgatactgccattcagaaaatccatttctgttgaacataccagggctttccttcagagatgtataagggattcagactgaatctacaggcaatctgactctataggaaagctagaaaaatcagaaacttgtactgaaagccgtagtgcttctcattattgcgttcactgtcttgctttctcctggacattcctatcctaagagggaatgagagatgaccaaaatcaagattattccctgcatggaggttttaaagggagagcagtgtctgtgggggccaaactaaggagggcatttggaatctgaatggtagctattttaagggccacctgatctttttctcctccctctttcaacaacttagaaaacatccttttatggctaaatctttggggagtttttgtttgtttttgctttgttagttttccccctgttaaggagaattttactgccttacagatcattgttttcctgcccagtatagattttgtggtactacaactgtagaagtcaccaaggaaaattgtgcttgtaggcattaaagaaactggttttatcaccctattttattatgtagcagcaaacaggaagtaattatttaggttttagttgggatggtaaagcaaaagtggctcgtgacacactgggatccatcaacaggagatccatcaacagcctttgggatttcaggaggctcaagtcctacgtgtaaagaggacatagaatctctctgagacaaatgctacctaacaaataacagaggaccaaataaataaacaaacaaactattaaaacaacctagaggggctggccccgtggccgagtggttaagttcgcgcgctctgctgcaggcggcccagtgtttcgttggttcgaatcctgggcgcagacatggcactgctcatcagaccacgctgaggcagcgttccgcatgccacaactagaagaacccacaacgaagaatacacaactatgtaccggggggcgttgggaagaaaaaggaaaaaataaaatctttaaaaagaaaaaaaacaacctagagccctttcaatgttaatttgaaatgtttcaaaaatggaaagttaaccagattatgggacaaaaaaccaagacacatcaaatagaagtaacaatttaaaaaactcagaaatcaaattccacttaccaaaaggagaagagtaacagttgtttttttttttttttttaatttaaacattttatttttttcctttttatccccaaagccccccggtacatagttgtatattcttcgttgtgggtccttctagttgtggcatgtgggacgctgcctcagcgtggcttgatgagcagtgtcatgtctgcgcccaggattcaaaccgacgaaacaccggcccgcctgcagaggagcgcgcgaagccaaccactcggccacggggccagccccaagagtagcagtttttttgagaaataagagtgggatatctgttgaatggtaggaggatatattgacagcttgacactaaaaagctaaagacattgaagacaggttttatttaatgagtttgttttagaacatttcaaaaagggaaaaataaggaaataaaatgtgaatgaagattataataaatcctgcaggaaaatacctccaggcttgtattccttggctaaaacattttactgttactgtgacacttgggggacagttcagactagcttggagcaaggaggatgagtccccaacaggatttacacacattctttacacagcacactcataggaagttaattataacatgtttttaccagtatttttgtgagaactaacccaacagtttttcagatagcacagccttttcttcctatcgtaaatgagcaggtttagagggtcatggaaagccacataaacactcctctttgaccacaacaaggctactggttttgcccccaggagatgcttgagtaagctgtggaaatatggcccccatgatacatggattagttgatacactgttgactgggatgttctacccaaagagtggctatttttaacttcaaatgcaagaaaagtcgatggcgttcaataagattcagtctcgttcactggatttcatattttcatcaagacctagaggagagacataaaatgagctcattaagataccttcagacactagctaggggtgtcgggcacaatcctgagaatagcttggcaatggaaagttgccctagggaactgcagaaagtttagtcaagatagttgtttgcaaaataaaaaaaaaaaaacctgagtagacgaactgaagaataattggctcaagaatatggacaaaataaattataggactctaattcattatatcccaaaccatggttcagagctttagcactgaatttttaaaaacacatgttgattttcaaaaatttattcaacaactattcctcaagtgagaaactgctggtgacaggcgctctgctagtacatccctggggtcagggggtgtatccaggttgctattgcaccctcagcacctagagcagtgcctggtgcagagtcctgcctggctctgttaaaggaggcgagggggcgaggggcaggaacacaaggaagaataagactctacagacagagtccccttggggagagggacaagcacatatatgtggtcctatagtggaagggaaaatatgtgaatatcagagtgtaagaggttgacaattcaagtttgaccttcaggttttccagattctagcacataggctatgcaaactcacctctgtttcaaagtcttatttaaaatagggctaatagagtccagtttcaacaatgttataagaagctcagaaagatagatagagatgtttgtttattaagtaccagatttgaaccaaactccattaatctagaaggcaggatcctgagtcttcatgtgaaaagcagtgagagtatattttttcctctctagagaactagtctgtgagaaggcactgcaggaataagaatttaatagcatagaattgaagggaaagatgctcttcatgataaaatggttgatgcattttaaagtgaggtttgtggaaattaaaaattaaataacatggctacaccgcctagatttttaatcttctagaactgggtaaaaaatgtgaacataatttttacacgtcaaaatcagaaatcaccataatatctatcactatatcactataatatcaaagtttcataaagcttctatccatgtagctgcaatatacctgaatttgcattataagccttgggactgagaacttgttttttattacccacaagtgatctttgaaaagtgtaccaagggtgatcggtattaatatatgacctaagtgtctcttgattgttggaaaattagttgaatcatggtttgtttttaacgacaccattttaagttatggaacatgcatttgttaggaaatgtcagttaatggagtggtgaaactcatcaagctctcagtattggttctgcaggtcggtaacggcatttcccctgcagtgtgggctgtgggtatggtaaccggagttgcacctcattcctgttgtgtcttttctaagctccatttcatctgtaagatgaggacaagcgtcaacctgtgcttagtggataaagtgcaattctaatatgtaaacatttggaaaattatagagcatatttaaataaaaatagagaaatatgtattcttcaaagtgtgcccttttttggtgaggaagatcggccctgagctaacatctattgtggatcctcctccttctgcttaaggaagattgtcactgaattaacatctgtggcaatgttcctctattttgtatgcaggatgctgccacagcacggtttgatgagtggtgtgtaggtctgtgcccaggatctgaacccacaaaccccaggccactgaaattgggctggccctcaaagtgtgccttttaacaatattttagagaatcgattggaatggtgtcagtgaagcctctaataaaaacattatgatatagtgtgaaaggaaagctgtgaaaaacataaggaaggcagcatagggcagagctttgctttacatgtgcttgctttctcctcgcacaaaggatctgcccttttcctgttctgccccttccttcacccttccctcacccaggccagcataaaggtatgatcattatagatgatgctattgggaaaaggcattctttttcaggaatcttagcaactatgggagagagggtagggatatttccacaacatatagtttcgaagtaactggttttgcaaaaaacgtcccataaagtaagaacacagcctgtagcatgcattgccctcagatttggagttcagtgaatttctcttttgtgtttcaccgtgagtgtagtaaaatcagcacgaaaacattgctttttccatctgcagcccctgagttaatagggctgtggagtagcaaattgctaggtgtactgtgataatttcctccctcccccaaatacagtgtcaataataataatggcaaagctagagtgactgacaaaattctcagtgacactcattttcttcatcttgcctactcttaagtagaaattcagctaaatatttcctatcaatataatccatgaaagaagataattataggaaatgtttttaccctgggcttctgccatttgtctgagtaatatagaattatcctacagagatgtcaattttctatttagttctgttactccacaaccctgttaagaattctgagccttctatgttatctcctatgtgacttctccaagtactgactttgcctccctataaagtatgaagctcttatccgggctttctttcgtgctccctaaaggtatatagtctaataaactggtgtaaattgaatttctgtaaagccctaatttctatttattaaatattaacttccaaaggacaacatggatatcagatctcatcttcaggaatttttttttagctcttttcaactgccatcggaaaatacttcattctctgtaagccttacaacctctcctgaaattggagcaagacagagcctacattgttcttattagtggccgttcatatggaggcaaggaaggagggacagagaaagtgctagacatcctatttcttggtggagagttagacaatttaaaggattttcccgtatcccctgattgagaaatatgcatttgatgcatttgtcaggaaagctaagttatgctgcagtagccaatggctcccaaatccctatgcctcacaacaacaaaattttgtcatttgtcctattgtggggcaactgtggctttactctgttgtcttcatttcaggatccacagttatagagcaatttttagttagattattgccaatcatcatgtcagaaagaaaagatatcaggcttcaactttcaagtgacacatcttttccatttacatttcattaaccaaagcaagtcgcatgaccaacccaatgataatgggcagtaaagtataattctcccctgggaagtagcagtaaatatttttgaagtccaccacagactgctaacactagctatgagccaggcactatgctaggcatttacaaataataattctaatctttataataatcttagagtatagggactgttaatccttgttttgcagaagaggagaaaaatctcatcagtttgcctatgctcacacatctagtaatgaaaaagaatagggttggatccagatctatatgaactgggtctcaaatagtgtgctcactttaatcagtatcctctttgaaggggaacaaagaaagaggaaaacctatccagttcctcaaaatccatgagtgaagaagctagctcatgaaactctataatctatacttttccaaacgtggaaattcccctcaatacaattattatctaaggaaataaattaaatgcattaattgtggtgttgttagttgcagtaatatacaaacccccaaatttcagtggattgacacagtgaaattagttttctcactcatgtaactgttcagtgtgagcattgctggtgaactggagacttttctctccctcctggttcatgacgccaggttgcatccaccttttgctccaccatctccttggacctgtggttcctctgccctcagtggatggggaaatagaatgtgaagaaggaatacttgctcctcacctacctcaccctagacatgacgcacactacttctactctcgttctgttaggaagaattaatcatatggccccatttagatgtaaggatggctgggaaatgttgtctctgatggagcagccactgcctgtaacacctctatattatgggagagggtgcatgaaattttggtgaacttagaggcacctctgccacacaggacattgtgatattttatgatgatgcaaactagaaagtaaattaataccaaggacagatacaaatgcatttcagtctacgaagtgtttgtttcttgtctcctttctccaaagacaattaataaaattaaatatgtttttgtcaagaaatctattaaataaccttctggatgttttactagctatcgttaggcatataaaggtatgatacattttctgccctcaaatggataccatgggcttctcccatttgaatgtcaaatccagggacagaggaattctgttggaatctcatccacagcttagcaagtgtatgaacaagacggtgtcctcacctgtgaaatgaaaataataatatgcctgcccagcaagtctcatatgggattaaaattagatagtggttgtaaagctcttatgaaaaaggaaattaagtggactgaatgtttactgtctcatttccccttcgacaacacggaggaactagcatatacaaacagcagcagaagcagttttctgagcacaaaatgcaaatttaaggaaacacatccagcttcatttacgtaatcatggcaaaatataaaatgctcaccttctagaatggaaatgtggagataaggattatcagtactttcctcaatattcttccctaattccctctctgactcacccaattttcttactctgcccagagttgggaaatcaaaccttctaggactctgggaattggtagtctactgtcctaatttcaatcaacctacggctaaaatgaggggagagaatctgaattactatatcttgcgccaggggaaaggagcattttttattagatctatggtaaaaagctttcccttcaaacctaaaacagagcccctcacatgcacctgacagtaaaaggagcccagaacatgtgtgaaacaaacaaattaaatgatttatccaaacctagttttcaaacttgagcatgcctctgaatcccctgcagagtttgctaaaacaccgatttctgggtcctgcccatagcgattcttatttaatgggtctggggtggaggaagggttcctgagattttagatttataacaattcccaggtgatgctgatgctgctggtctagggaccacattttgagaaccacagaaccaaaagcattgatcctcagccttggctgctcatatcaatcaaccgctgatgcacagctagagttaaaatcacgtcctaatgacgatagacttccagagcggacatttttttttttttaaacctaggccttgattcaggaatctggccaagaattctcttataactaaccgcctccttgtggcttttcagtgtgtcactaaaggctctttgagattgtaattacccttactctttctggtctgtgattgtttattcctctttatcctttacatgcttcttcatgtctcctgctagctcactagctgggacccagaaggttacttggccaaagcattgagaggtacaagataatcaacgtctagtacaattccccttccttcttgaacttggctccaccacttaccagctgtatggcgggaccaaattatgtaatttttctgaagttcagttctctcatctgttaaaatagaggtatcaccttacatgtttatgtgaacacataaaggtgcttaacgcaaagtaagggctcaataaatattctatattgcttctgcatttttcttcccttcttccattcgtgtcttttttcctttactccctgccccacctccattgtaaagaatggacaagagataaccttttaccatttcccaccttcaccaaatggttccacaaggcctactttttcccacatcttgctttccttctctgaaacagcactatctctcctcaggttctaagaatctggctgcagctaaagcccccagatcgtactctgtgccaattgacattaaaatgagctcatgagacaacatataacactttctgaaacatagttttatgtactgtttcttagcagacatcccagtcttacctgtactgccctccacatttcccttgtaatatatttctgtcataaatgtgacataggtaacataaaaatccaatttacagacatcccaaaaagactgactattttcaaaactcaaaagtctgactgcttgtgtgatgaggttgtttgttaaaatgtgaggactagggacgtacttaataactggcattgaggataagattgcctaccttctaagtactctgttctgtatcaggtcttgtcttaaatgcagaccttacatttaagcagatgtgcttggccacactgcattgaggacaggaactaatgagtctgattctctttggggtctccataattctggtatttttattgaatataaaattactgtcttcgaagcagagctgttatgtttttcttgagctttagagggcagcagaggagctgtctgaaaaatccctacttgaccaggaaacacattcttccctcctaagttatttctgccaagctttctctttggaaggaaagcaaaagattatattttaaaaggtgcttataataacctgttataaaaaagaagagattacctcctagtatatttcatatataaaagccattttgctttgtgaaaaattcaccctgtactgattattaacttgtgaagaaatctaacagaaatttaaaaaaaacaaactattggctataataaaataatgtagattttaagaatgttttgttctgtttgtgtgttttacaatgtaaatttagaaggacaaaaatagtttttggagaattttggctatgtgtaaagagttaatagatgatattaagcaatttgtccaaaaatacaaatttcaaaggtaatgagaaaactgttttgctttaagaattttaaaacacacaaaccaaaagttaaaacaggacttactttttctggtagttagagttcacttaactagaatagattttttcagccagtgagactcacaaaatctgaatttagccatcatacagtttaagagaaaattatgcaaaaagcagtttccaaaatctaactaaaggctccaatgagaaatgctcatcctggatttcctcttgttctctgggtgactccaaattcacaggcacgcagccactactatgattccagttcccataaagtgggactcagttaggtttgaaaagccacctgcacagcctacaccattctatttgggaattattgcgagtctgcaatgcgcgagagcaagggtggactgcatggtatgagggaccgaagcagaacctatccagctttctcttgatctgaaatgtttccttttgggattgcatcttccttgcctgctcagtactggtgacagagggttgctcagagctagtattcttgcagtacaagtccagagcttacactttgtggtagaagctttctgcttgccctgcccaaatcctttttcactgctacacaaaaaaaatgagctcaggcctttctcacacatttggcctcttcttccccctttctgatgtttattgtctttcctagtgtattttaattcttttagtagctgtctgatcattttccttcttcctagtcttctggctttcttctctcttttgactcttcatctgggaatatatcttcctgaccccttaaaacctggctggtaagaagtcaggcatgtctctacatagctctatattttctctagaaaatttattggagggtagtatctctatcttgtttataactctcacaggagatcttctggagcaggtcttccaagtttgttcctatcagtaccagctttctgtgcagcaggatctttcagagtctactgatgctacctaaggctctctgcccatactgacgagagagcaggtggtttcctaaatttttgtggctctcctttgtcaatatggccacaccatctggctttaagaatttaatctgacaatgcagcatggccatttgacagaagaagctggaagaggccctcagaaactccagaaatgagtcataatggtcttcaaatgttcaggaaatgtcatgctccctttattcaaaagtcacagttaatgtgacatggcaggatttcatgagtctcagaatcccaattccaaaattcttgtcatatcttcatgacttgggcatgactcctatcaatgctctgaggtgctcatctatgcatgtgttcatgaagatatccaccttttgttgcttctttccatttagcattttagggagggagatggccatggtctggaggccatcccattctttctaagccagtaactctcaggtggctccatcatcactgaaatgtgggtgccagttcccagggggaaccacagatattgaggcgtagtgtctacaaataaataagcagactgtataaagctcccacagcaagtccaagtccagagaaatgcagagaaagttttctggttggaaagacgtctatttcaggcatttatcacacttcttcactcatccttcttaatcaaaccaaagtaccttaaatgcttaccatgtactcaatagggcactactttggttgtggaattactgcttatttatttaagcaataaaaataatgtccagcccagaaggaaagttattgtgtcagattttttttttaaagattgtcacctgagctaacaactgttgccaatcttttttttgtttctttttctccccaaatcccccaggtacatagttgtgtattttagttgtgggtccttctagttgtggcatgtgggatgccacctcagcatggcctgctgagtggtaccatgtccgcgcccaggatccgaaccagtgaaaccctgggctgccgaagtggagcacaaaaacttaaccacttggccgtttccattttccatttaggtccttgccattctatatttcagaaaagatttctaactatgctgaaaagccttaggatcagggaatgggagactgtttctttttaaagtgtagagtagtaagtaaaatggtagtgactgatgagttatttcttccaggatgagtttgctccacctctactgaccaatgcccaagatgggccacatcttgagtttagggtgtagatgggggcgtgcttcgtggaaaagactcaaacaattctaaagcgtattgattttctttttattgtatgggagctgcattaggagatgttatgtggagtatttctgtaggttggatggggtttccaggacatcacagaaatcatgctttatacctttaatattataactgtgctgagcataattcgacctatttcactcttatttcctctcttactctcactttctctcactctctgtagactgaagtgagtagaagcttttagtgccacaggttatcactgtgataattaattatcattgaactggcagtgaaaatgttagttagtggatggtatttgttgataaaatgccagatagcagttaattaattataatagctcattttggggaaaaacaagtccatcagaatgaggttaatgatgaatttgccatctgtcctggattaaggcactgtctgggtcagtgttgagtcactgtaagttccctgaagcatcttaatacaggtcggatgtatccattgcatactatgaacattgtgggtaagacccaggagttcaaggtttactgtccataatttggctgtacagggttttgggatttcaataacctgaataaatgggaaaatatggaagcaagagaactaagcaggacagtgatcctggtctctgggaacagtacctgcaatgggggtggatagaatataaaggagcatgatgaacttgagtgttgtaggagcaggatgctaatgtctagcagcagtgtgggaccaggtgctcagttcattcacagcaggatcccagctagcagccaaagaagaatagggaacattccaccctcacccatccttccccccaaaaagggtgccagttgtttgcaggtgctggacaggatggaagaacaggtcagcagtcttggtttgagaatgaactcaattcctagctgagagtttgagagtaaggccagaaaaaagagtgagaagctatgaattgttgtttgtatgttttaagctaccatttgtgaagagtgtctattatgtgccaggtattacaatgaccttatcatgttttagattcattacaatcttgtgaaataggtgttttatgcttaactttcagattagaagactgtggaacagagaagttaggcaaagtgctcaatgtcacatatctagtaagttccagagtcaggttctatacttagatctgtctgtatccagagatctttctgcttcaagacagcaagtaagccagtaaaatggggatggtgggcaaccgggacatgggacattaccctggacatctgatgagagttaattaacctggctctagccttgtaaactcactggcttgtagactggggtattaggtaaacaatcttttgcccagatctagacttgactgaagtagggaaaggggtatgtagtaaatccttgtgaaccagcacaggtccacaaaccacatttcaagtagcacacgtctaaaggacacatcccaaaaggtgtcctgttaccccagtgatcaaacgtgtatgggaaacattgggtattttatcggcttcatcctcccccaggagatgcttaaactgcattaccagagagccctatgaaatcttgcagtaaataaattgggttacatttgtttaaatcaacatttacaaattttttctttctttcatttattcatgaatgcatttatcatctttcattaatcaaatgtttgttgaatgcttatttgcccaggaacattccaggcactgaggatacagacaaaaggccctgttctcatgcaccttgtgtcccagtgaaggagactgacagtaaactaaataactaaagaagattagagtagtgataagtgctggagtgacaagtgatacaggaacgtggtccaataagggtgtgttgcaattaaatatgttctcagtgaaaagatgacatttgggtaaaaaccaaagatgagaaagcaaaccatgcagatgtggggtgggagggagagtgaccaaccagagagagtaatacgtgcaaatgccctgaggcaggaggatacctgtaaatttgagtaagagctaggacagaatgagtggagagaagagaggtgagaaagaaagtcagaggggtaggaatggaccagatgatataaggccttgtagacttttgtaagattttcgcttttactatgagtggtattggaagctgttggagggttggaccgaaggactgatatcatctgacttgtgtttgcacaggaccagtctggctcttctgtagagaagagatgaagtgaacaaacccttaatcaggaagattaactggaaaattatttcactaattcaagcttgaggtggacaaagctcagagtaaagtggaagtaatgaggtggtgaaggtggttggattctgaatatgcttttaaggtagttctggcagaattagctcacagattggatatggagtgtgagaggagacaagaaaataacgatactacagtgtttgacctcagcaattagatgaattcacctgttgcaaatggaggaagactgaagagggaggagatgtgggagtgtggctatcaggaactcagttttgaacttgattagtttgagatgcctagtcgacatttaggtggacatgccaattaggcaattggacatatgagtctggagggcaagggagagtctcacgtggaaatatactttggtcagttgtcagcatttacatgatatctacagccatgagactggataagaccagcaagggagtgactgtagacagaaaagtccaagtctagtccctggggtatggcctcattaagagcttctcgggtgaggagaaaaaccagatgagacaggaaatcagatggggaggaaataggaaaactaataaagtttgatgtcatggaaaccaaataaagaatgtgtttctaggaggatggagtgttcaacccgattaaatactactgatggtcgggtaagcctacgccggagaagcagctatggaattttgcaaagtggacttcattggtgactttaacaagagccgttttagtgagtatggaggtgaaagcctgattaaagggtgttcaaaagggatctggagtaaaggaattgaagagagagaccgaagagtaggttgaggcagtagctggaggggaaatgagaataagtgaggttttgatgatggtgatggtggtggtggggtggttatgaaaagagaataacagcatgtttctctgttgttgaaaaaagtgacgatggaggaggaagaacaacgtctttgagcaggtgagaggaaatggagtcttgcacaaaggtggagggactcgtctcacctaggagcagattcagaaatcagggaagtatgtgagcataaattaaggtaagacagtagctgttgtggtgaaagctagaagaatttcttttcagatgcatctattttctcaagaagttttaagctgagaatgagaatgggacaagtttaagaaatctgaggtgagagacaacatgaaccagttgtctaggggaggaggtgagtgaatgagagtaatgtggtctgatggccagacagcaccgagggctctcttagtagtgaccacgaattgaatgtgagatctgtcagcatagctatgtgatttaagcacacaagacttttccatgtaatgcttcttgtcaatcagctgcaactcttcgtgaagtacacactgttctaggttataggtggaaggtttcaggcaggacatggatatggtcaaatttacacagtaagatggtcaccatggcatcagtatgtaggatggattcatagggagtaagatagagggcaagaacttaggtaataggctgctgagacagtcaagcaagaagtggtggtcatgagtagagattcttttatttttgtgcctatatgtggttcagagaatgccatattgagaaggtattctctttttccatagagcaatggaaacatctccgtcagtcctctatatcagatgggttttggcatttgcgtttgattaacctttttcagggactgccatatgccaactctgcataccccagcatcttccatctgcctttactctctacaagaggcaggtctacaggaaagagggatgctggccaggtagtgtgatttgatttgcatgaatgaactagacttcattgctacactccactattttctagcgccatcagtccccaataccagaagaactttcttgttaagatgaagctatttctgattgttttggggggttctttttatggagggagaagctcagaagatgaggtattgagataggaaatgatggtgaaggattatctgaaaaattgctcactgcgaattgggagctagagatttgattttctacctcattttggaaaaattctgaaaaacatagctggcatgctaaaaggcattaaacctggcaggaaagtaaagagaaagggccagcaagccgccaacaaggaattaaaagagatcatggaatatagcccagagctctgtcaggctgcgaggggcggtccaggagaagcagcagcagataacaaatgatcataagctgagactaattcattcagtgggaaatgaagatggaagcaaatgaagaaacctagactccactaaatgaaagatttcttttataaagcagacttagtaaaatggaaggaaggtgtggatgggaaagttagatgtaataggtatgatgggttttcacacaactgaagagaatatgtggcaagggctaaaaacatcaccagattcagaatttgactcatttgaaatgttctatcagaggagaagatgagggaaaagctcaggacagcctcgatcccctgtgtgagcacaaagtataatatgaagacgtatctcttgaagttcttaaacaacacatcttgagctctttgggaatctgcaaattcatggatagcatcatagtctaaaattcatcctgtaaaatgaatgaaatacatctttgtaatgggacatctgcttcagccatgtggacataatgagggctacccaggaataatcaaagaccagcagacctacatggagctgcagaggctgaatcaggctggctgaccccacaaataagcttactgagcttaggaacttctcttggaaatggattcaaacatagcctaagagagactcaaaaatgaaaacagcagatgtaaagtttccaagaccaagagtctactgaactcctttcttcaaattatttggatttacaaaatgaccttatagaaaaaaataaatcaacttttctttcagcaaagtcaacaaagaaaactccatgataggaaaatcaccactttatataatatttagccatctcaatcttaccataagttgtaaataaattttttaaatatttatatatttattttagtgtgttttagaaattatgtaacaaatgcatcaagtgtgtgatttcatttcaaggcttaattttgaagaatgagttgctttaaagaaatataaaggggaaattacgtaggtgagtcgtagatggagatgatataaagtgaacccagttgtatgatatagttgtacttattagtaacacttattagtgtaattaataatcacttattagagtgacaccataacaaaaaaaagttacctcaacattaaaaaaataatgtaccatccttcaaacttgcatagactaagaggatatgtaaacaaattctgatgcaactgcaaagatgtagtttgtccaactggaaagaaaaaagattttaggggcagatggatctagattcaaatgttggctctgcccattttttgctgaatgtgtttagggaaacaatttaatgtcctcatgactaagtttctttatttgagggtaatatcatatgaagtccttagcaaatgcttttcccagagaaggcattgaagagatcctatcattattattgcagatataaaaacaagatcagttttcttctctgtcttattcaacagataatgaggcactgaaaaactctgatggattgatatgatagaaagaagataagatatagaatcaaaagatttggtttaatttggattatcaaaatttttcactcattaaatgtgcaattatccaattcatttgttttctctgaacctgatgtggaagatcctaactgggaagcatacacaattacaactatagtaatatgtaaatacatacaaacaatggctataagactatcacatacatatgaccatatggagaaaaaggggcagagagcttgagagaaagggaggatgagaggaaaagaaagaaaggatattgtggaaagatagttggcttagaaccagaaaatcttgattcaattcctagcctttgaaactgatgaaagcttcagttttcttatttgtaaaatggatgcaatagaacctccatcaatgggttctttgataaagctatctacttatcatctatctatctatcatccatctgtcaattagttgcatagagtaagtgctcaatgaatgtcagtcacatttgagttgttttctatatcaaccaggctctctgctgggaactagtgaggctcagctgattttagtggattgtggcttcctagtgcatttggaagcaaaggaaaggggagtttacagtgtgagcagagacactttctgagagattgtaatactcaccctttggggtcattgtctggatcttgtcttctctaggcactggtctctacttcataggagtgggccctcacagctgaggtggcatggggcacaatttgttccttgcctgtagctgattagatcaggagtagacacatctgcccaggccgctccactttggagaaagacaaagaaaaagagcattgaatcggactcacattaattgctagacagaaagcctactgcaaggtctctgcgagggtgaccagctatccctgtttgcctggaactgagggaattccctagaacttgggactctcagtgctaaaactgggacactcctggataaactagggtgtgtgctcaccctacaagctgccttggtcacggccctactcaaagactgattgttcaactctcccttggattcctacccctgtgtccttccaaaaaactgcatttttaagtttaaactacctagaattgaaccaaaaggatctttaaaaaaaaatgctatgtgaaaaaaatgctgaaggaacagggaaaagaagagaacatcaatataaaatataaactgttaactcaagccatcaaccttgaacaaaattctttattgcccctaatatttgtgttagaaaaccactgcttagttgagcttgcaaaaaggatgctttttctaatgctccttaatatttggtgaattatgttagtgaattgagaaggattatctatactctgtttggaaaattgactcattacctctgttacagaaagggatgagggtgtcttagcatcagaagcattttaccctgaagtcatgacgatgaatcaggaattcgatcaggctgtgtctccagtgaattgcattgtcaaataatgttaatagaaccaactgaagcttctctcacagccttctcaagctttcatgtgccttagaatctcttcgagaacgagttaaacatttagtctcttgggcctcctccccagattctgaggctgggcccctgaatcttctgttgataaaataccatagtcccttgcttctcaaagtgatctggttcagcagcagtagccccaccagggagccagtgagaaaagtaacatctcaggccccaccctagacctagtaaatagcataatgtttaaggtgtgctgccctagtagattctgaggcagtggtctaaggaccacgtgttgagaaaatgtattctagtatcttccaggccaacaataatgacaacaacaatagttaatgttttgagggcttactatgtcccaggcattattctaatactttaactcagttaatcctcctaacaaccataagaggttgttgttttaagatgaggatatggaatcttcacaaaaagaaagttcccaagttcaccagcaggtgagtgataggaccttgcttcaaagatagaatgtctatcagctgaggggagatgggactgaccttcaaccagtactttagggaagacgttcctcatgacctgaaagtcaaaagtcgtttattgtgttgctgataatgaatgccaaccatgctttctgggcattctgtgaggcctcagcccgctcacctgtgatgtgtagatgacatacctcacctcatggctctgtgtgaggcttgaatgagccgcctgaggcaaagggcagggtggagggcaggactggcatgaacaaggggctcaaggaagtttcacagtgtggaaagagtgagggctttggaggtaggagaagcctgggtgggactctcagctctgctaatcatttggtcctctgcaaagacatcaccaaattgtgcctcagtttcctcacctataaaaaggagttaataaagcccgtcttctaggattgctggaggaattaagtgagatcattttcactaggtatcgaaccatctactattccatatatgggattaaataaatggttattacttatattttcttataataatcatttttaccctgaattttaagccattgtcctcttcccgataattatgaagcctcaacactggaagggatcttagttgtaaatctttctcccgcttgtctcccccgcaggcctgcacgttctctagcacagctgactcacacactactatgaaacgagcctctgcttcctaaaacaagaggcccttctttttgagtctgcagttctaaaatgactgccacaaggcagtagacaataatttatagatgtctaaaagtttctatgagtagccccaggtgtctcatctaggaaaatgatttttcctctagaataagcacatacccagtgaaataggtttattagcattaattaaaataacgaaaatatgcattccctttgttgaggaatacagcccctcttcacactaggaaatttcatggtgttaacaatttccaaaggctttgcaaaaaggatatttttttttcagagatagaagaagttttggctttcttcccatgctctgatgactccgaagaaacataattgcacatgcaggacaaataatagtcctaataatgacaatgataatgttaattgaagcagctgtcgtcatggtagcaactacaataatggtaactgatatttattctgtgcttgttttgtgctaggtgttgttttgagcaatttattgcttcaggtatttttcaaaaccatgctgtgagggagatattattatcatccctattcaggttaagtaagtcgcccaagaccatgtagttgttaatgtggaagccaggatgggaacccagacagtgtgatgaagagcccaaatacccaaccacagagcagtgccaatttaggtaagaaagattcatcccattccagaaatttcaaccctttgctctccaggattcttttcttctggtagcttttggtttccttctctctcttctacataggctggatcttggatgtaaagactcttagctgcatactagagaatttaaaatatagaattttcaatgcagtggcgttttgtagaattctgcctttttattttcttcttttgcaatgttaaattttgaaattctctgtctaacatttgcaatggtcacatattctctcaatgcctaaatctctggtggtttagaccaagtagttagggaggaaaattctccttgctagcttccagaaggttagagacaggagaatcttttatttatttatttatttatttgtatttagctgtcaacatattaaactcttatttcagttagtttagtttctgtaaggagtgattatcttttcttttaagtgagtaaggatcctcaaccatcttgagtgttcagatgttcagatgccctaagaattgctctcttacagtttccttttccttcagtcttcactttgggcctgaaaatggacttgaacctgttgttgccagcaaagatgttttcacaatattttctcacatgtccttttgtgaaaattactgagggcaccttcagatggttttgattactgttaccacaccactggtatatttggtaacacttatgaatgtgcaatgtgacttcattaaggaatctttcatttgtcattgtgtggaaaaaataatcatttttgagttctcttctctgctacaaagacaacagtaaccactaacttctgtgtagcatgctataacttaaagggcattcacatgctgttgattctttaagccaccttgcaaaataggggttattattgtttctattttataaataaggaaaatcaggaaccaagaggttaagtgacatatgtcaatgatagaaccatgattcaaaaccatttttatgactctaatatctttcagtaccccatagagttagattgacttgcatcagaatattttctgggatattatgccactgtggatgtttgagtctgtgaccatattttacaaatggcataaaccactgtttcttaccactgacatttcaccttatgctactgttattctcagccacaaaatgccagatgggaaagcgatcgtgttactcattactcaggaacagcgatgactatggaaaaactagattcagattacaaagaaccacttgctgttaccacaggtctaagaaaattctcccattgcctgtggttgcacattgaatttcccttatccaagaagtttttgaatattcttttcaatgtatgaaacgcctcttttatgccatttacattcatcattatgtcatttttgctctgtgtttaaaactacccatttatcctcatattttgaagcagaatatctaaagtttaacacccggaattctcacttttgcaaattccagattattttgtgattttgaaataaccgtaaatagtgattggcacatggcagaatctcaataaaatatcttcgtgaaaaataatttacatttgtaaagcaattaaaaattttaaattatcaggccagcctggtggcatagtggttaggttttcatgctccacattggtggcccaaggtttgcgggttcagatcccaggtgcagacctagcaccactcactgagccatgctgtggcagcatcccacataaaatagaggaagattggcacagatattatctcagtgtaaatcttcctcaagtaaagggaggaagattggcaatagatgttagcacagggccaatcttcctcacacacacacaaaaataattaaaaagaatttcaaagtatcttcacatgcttttatttggtccttataatactcctataagtaggcaagggaaatattattattaaactcattttatagatgataaatggaagcacagatatggaaagtgacttatccaaatccattgaactatcagtcttcagattgggaagattaaatagaaactgatttagaggaaaaatcaagaaattggcagtggtcatgttaagttgtaggtgcctatttgatatctaagaggagtttgatatgaatcctgagatttccaggacatggagatgaaattgggagttgttaccatattgacaacatttaaagcctggctgaggtcatcaagaggataagtaaagagagaaaaagaatgagacatgaactgaactctgaggcactccaacattcaggagagggaaaatgacaaagaacagctaagaataaaaggagctatcagtaagaatggaagaaattagataactgtttcctgaaagataagacgacaacaatttatgaggaaagggcggtatcaactgggtcacatgtgcctgatatgtcaactaagataaggacagaaaattacctcttatatttagcaatgtagcaatcattattgaccttgctaagaggagttttggactggaataaattcaagagattagggaggagagaaattggacacagcaaatataaacaactctattgtaaaacaaagggtggagagtaactgtcctcgctctttccttgaagcataactgatttttatgccctcagtggataaaatcaatcagtgcttttggtatcagttggttcctcatgaaccacaagtcctaggaagggagagttacgaaggacctcacacttctctcctccgatctctgcaagccctggagaacagggtgtccatcgcagcctctgacttaatttataagttataatctctcattggcaaggtctggagttaaagacaatattattgagaacaatttcctcatctcagcaaataatgcaaaaaaaaaaaaaaagggggagctaaagttaaaaacaaataaaaaataaaatacaaaagtaaaacaagctgataagcaatagaaagtaggaccagtcaggagtattgtaggggaggaagacatttcctctacccactctgggtctttctggctggacaacaaattcaattcacatgaggcaggatagaaggagaaaattaaacaaaagctttataacatatatacatgggagaggctcaggaaaactgagcaactctccaaaatggcagaggttctcatcttaaacaccctcctcagctgaaggcaaaggaggatgttgggggtggggggagttgtttatgagagattaccagaaaagcacagtaaacaagagtaaggttattatgtagatttaagtccttgccttctgcattgttaagagtttctggaggtgaggtcatccccctccttcttcctggtacagagagggagatacctttacagatggagatttcctttaaacatgtaaatgtctctaacaaagggtgggtaaattctacttttaagagtttctctcatgtctgcagtttttaaaagtaaccagcccaaaataatcctcgtgccaaagagacctatcttggggtggccaattctggtcccccacggtatcttacctttttcagtagatatttgcaggtacttcttaaatgaagaatgaagtaaaattttgtaatacaaagcagtgcttgaggtcttgggaaaaaatattttatatctgttgatttattttgtatttttccaatattacataaattgctatacgtcctaagaattaaggtctttgttttgatttgttttgcttcatttcaggagatcgtgcaattgagttatgccactgacaccaaatagctcaaaccctatcatttcatttggctcaattttcacagtatagaaatgattctgatatttattcaagttgaatagagatgtatgatcccatcaagttaattattaacaaaaagaagagaaaatgtgatattgtttaaatagcagatgtgttaatacagagtaattatgttgactgaaaatgagcagttccatcaggcagacgcccaatttttcccctaccaatgtcaacactgaatgtcttttaatacaccggaaaattactaggcagatttgaaataacaaagcaatcacagcagactttgtttaaaattcctctagagactaagacaaataaaatgattacagtgatttgaatagttggaattttatagccattcacttagaaaaacaatctcccaattagttgacaattgatagctgctgatatttcctgaaatggtttctgcattaagagtattgatctgtgcttctcctcagtaggttacctgagcaaaggttattctcattatagtgaacacatataaaggctgtacttacaaatatacatattttactatttcaaatttatagtctaaatgtattccctatatataagcttgtattgcttatactgttaacactattgtaaaacattatgctggagattagtgaatttgaaagctttattttcttctactctagttatcttgactagggctctgaatttaatgatttcattttcctttgtaattcaggcaaagaatgaacaagttcactggatttttcaacttaagtctttgagaagcctgattacggattgtgattttctaaggttaggcatcttagaagtatttgcaggtatttgtttataaagcaaaatggatagaatttgaaatgaatatgctgccaccaagtatattagatatgtgcttcctctgtaacagaaaacaaactaacagtgccttaaacaagtagagcttgagtttcttacataccaagaagattggaagtaattacttatttcagatttgtggctcaaccacgttagaaccatgttttggtctctcttacgagcatctttcactcatgttcaaaagatggctacttcaattccaggcataacatccatattggaggcaagaagaagggagaggggattttctactatagatatccaggattgatatttaatgggatatacatgaacatggccttgaaatagtcaatttacactcccacaagatacaagaggaactgagaggtcaggtcaggatgcatacctctttcttattggctcctttctctactttttgatcatttctagtttttgttaacttaacatggctgtacccctggaattctcctaaaaccacgtttttttttttttaaagcaatgttctctaagttgtagcctcaaatgcatatttaaattagcataaacatgtgaacatctataattaataaaagactatgtaaatgaacttcagtttgaattcattttatttacacgtccccattagttaaatacctactttctaatatttcattaatggtttgagattacctttctctttttttcatgtaaccatctaggtcctttatgaaaatctcctctgatttttttcggtatacaacattggtaactcaattgtacattggtcagctcactcacatttataacaactaaccattctaggaaaaagccctaaaaaaagacatattggagtcatattttcctacgtaaaaaaacattattatagtaatatgtatttcttattctaaacattttatagaaatgacaaaaattctctatcttgagttcagtttaagaaagatcatatatctctgtacaacatattacatgaagcagtctaactttgtatacatttattaagcagcagcaaattgcataaaattgcattcagaatcctcagagaactttagctgtagaaaagaaatattgccttcatcaacaccaagtggcctatcacgtctccttcctgggcctgtttgaactttgaggtgtgtggaacttgctcttggcaggtcagcttccatctaaacaggtgtgtaagattgagagactttacctctaggtgaatacatgctttaaaaatatctgcaaggagcactgtctaataattccaagagcagaatgtttcatcgttgtaataaggctcaggaaattcattgctggagaattgacttaacaagtatgaactaaaagaacgagagcataaaaattgaatcagaactctccttcagaccaataaccaacgaaccacacacacacgcaaaaccatctgtaaaataaatagacgtaaaagcttgagttctattgacttcatgttgactaaacactttagccacagcagatttaattcaaagaagattaaaagtaatgatagccttgggggccagggctggcctggtggtatagtggttaagtttgcatgctctgctttggtggcccaggtttgtggctttggaccatggcacagacgtacacactgctcatcaagccatgctgtggtggcatcccacatacgaaatagaggaagactggcatagatgttagctcagtgacgatcttcctcaccaaaaaataaaaagaagcaaaaaacgaaacaaaaagtaacgaatcctttatcaaccctttttgttacaaaggagttagggtttctttgctatatcttgcttagcaaccctatcactgaatgttgagttaagccactttggaagatccatagtactttatctatatagttgcacttaccctctttgaaaactgaaaaccattctaacatgtggaaggaagttaggttaatggaaactggggcatccagaattattaggcccaaggcagtagatttaaaatgatgttcccccaaatcctaaagatttagcaaaactgcctcccagacttaggggaagagattgggacacctcaaggaggagcagctgcctggtgagttcaaggctccagggttcttgctttgtaaatccctggagatatctcagaactgttttttgtttgttatataacttggcttctgtaaaagattctgtttgaagaaagtttgtcttgttttagaatttttgtgttattgttgaaaaccgttgtgccaagagaatagggatacatgaaaaaattttaaagaaagaagacaaaaaaggcctgagaaatgggtaagacatagtgaaaccacttgttaacccatgctgtattttgcaacacaacaggacaaactcccaaacgggaaattcaatccagcaactaatgactgaggattcccatggcctagcactctggtgcattcagggtatgagacaaaggcaatgacttgttggggggatatggctcaggtaggaagaacagtacacttaaatcaaaactttggttccctgttctgactccacctgaaggactgaaggctacagtcacttgtcctcttagagctttgatttgtcagtttgtaaaatggggccacagattttgtgaaacacctgctgtgtgtcgggtactgaggatcccaacatcaatgtgatctctgccttgcctgaaagaactcacagcggagtgagggtcatctgaatagtaaatcagctaacatttatcaggttattgttctgggccaagcaatgttccaagcacttttacaggaattattttgtaaatcttcatggcagtcccactaggtacaaaatatatttattcccatttcataggtatggagatgaggcatagatcagataaataacttgcccatagtcacataactggaaagtgcggacatgtctctgagtttagttctcagaattctaaacaatttcattgtattgccatccctgaatcaagaagatatggtgggaaggaaatatgtagtggttttgtgaaagtgttttggaaacaatggtgttctgtgtaagtgttagttattgttaaaacaaggaaagataaataaattaaaggttagataaatcacaattggaaatgtccaagaaacaaaaagtaaagatgtaagtaaaatacagaggtgttaaggggaactacctcaggtttttagaatataagtaacaatttatagagaattcttgtgccttcattcagagtcctttctggattaaacgttaataagaaggaaagtaaggaccagatatttcccaggctttgactatgtatatctcatcctcagcagccagcaggacaatccaattgtagatataaatgattctgtgacactgagttcatctactccagggaagaatttgggttgggaatcaggaatgaaacaatgaatacactttgagctagagggtgaacattttaagtggagtaatataccttccaattggtttcacttgtgttccagaaataagccacttcagcattgtcaagatataatagtaaggacatgctctaggggtatgtctttcccttctctgcttgagactggattgtctcctgctattgtgtctaaagtctgttctattcaaagcctatttgcagaaacggcatttgtaaataacagcagattagagtaacttaaaggtcaatggcaaagctgaaatataaccagtgttaagcaccgcatctagcagaagacatctttaataacaaggtgcttgcaaacatctgaggttaggaatcggttttaattcaactagtgggagagaaaaaaaagcttatctgtatttgtgatttcaggatagctcctagtttctagaaaacgtgcccgttattaagggcatgaaaacagatattttagaaatttgctatccagtgtcactcctcaattaacttctattcattcaggcagcaagaattggtgttcggcccattaaaaataagaggctttcttttctattccctttgctgttattgatattgttaatcattttaattagtggcttcccatgattccaatcaagcccaattagactcaaaccagataaacaatgaagaggtgaaaacagcagctcaaaacatggattaatcttgctagtacaaagtgaaaagagctgcattttaaagtgcttctattcacctttaaagaatgacatttcctggtcacactgactgtaacagcatctggttgcttgtgtgaaatggaatccatagtcatatctttcaaagactttcaccctctctgcccctcgtacacgtatttgcttgcccacatgttctccatcatgcccaggtttacagttttcctcaccagtttccaaaacactttaaatttcttgcattttctctttcctccttctcttcttatgtacatgtttccctgactttctctgcccttagaaatgtccagtcttctttagagaatagcatttcccattctcagtgatgttatagaagttcagtgcatatattttcaggcaaccacaatatatctgtactggatgcagtgctaaattattttgtaagacactttttatttgattccctcaacagctctatgaggcagttacttctcttaggcccattttacacgtgagaaagctgaggtttcaagaacgtgagtaactttatcaagctatatccaattagagtcaagatttgaactcattctatatagccccagagcctaagcactgaactcttctggtcagatttttgctgaacttttacttaggaatagaatcaaggcagtctcccagtaggaagatgtgcaaactctgaaactgaaccttcactgctgttttcatagaaaggctgcaatgaataataatacctttctatgagaattgcatccccttttccaccacatcctcacttctctaaccatacttgctaagtgacatggtatattatcttttaggtgagccaagaaattttgtcagtattcctagatctacagagtagacctcatccctttcaaactattcaattgtaacatgggtgtttatcttattaacgtaaaacttcccgatctctccattttaaatatatgacatggaagagcctaaaaagcaacagttgagtttgaatcctggctctagcatttactgtctgagatatcttgagcaggctacttaccttttttgagctgagggtgtggaatatagacaataataaagaatgaatgagctgaacccagataatggtaattataaaatttgccttgtggtattttttgaaattttgcagaattaattgaaatatatatttaaatgtgcctgacttgtaattctttcttaataaatagtagtattaattgttatgatcttgcaccgtatgtaaagcatttgatgagtttcatatatggaagcaggtagatgataggtttcaactaggcagaatatcaggagagtgtgacagccaatagcaaaaatttaaccaaagggactcagattagaaaggatattggatataatagagcaacaacctggttattggagagagaatagaaggttacacttgattggaaagagcaagagtattaaaatagcaaataccaagactcagaagcatatgtattagtcagctattgtcacaataatgctgagaaacaaacaactccaaaatgcagttcttacaagagtacttattctcacactcattttgtttgatctaagatggggtcaactacatctctcatgctgtggctcagctagttttggctaaagcctggaggttcagtttagatctgttccatgaacttttttctggagcccaggttgaaaaggcaatagttcctagacactgtttttctcatggcagatcactaaatcttaacagagaaagctcaattatatatgcacatttcaagcttcagcttgcatcttctaatatcctgttggccaaagcaaatcatgtcacttcatatagtaacttatatactccacccaccatgaaaattgcactagtaaaagaacaaagcagcctgattatgactgtggttcaattatttgacctgatccacatgaccttttatttgtagcatgccacgatagaagcattgccacatgatgatgtgctttggtcttggggtttcatttgtttgctttgatcaaggttgttggaacatattaatggagctattgagtacctatccatttgccttcctaaatttttttctccaggaacttcatgtctaacttttcgtgtccatttcttgagcagcatttataagcacagtgaagaaaaatcagttgcttcaccattggtactgggctttttccagctgactaatttgaatagtgatagggaagtttcagtaagattctctctccttggtttgtccttatgaataaatgcactctttagtgctgttaaacatcacaacttctattacacatttgcagtatgtatctcccccaaaatcagtatatgtgaaatcaattctgatttaaatgctttgcaggtaccattatgctttactaagttggggtgctttcttatggtcaaagaatgagaagcaacttatgctaagttttattgggaacttttgttggctcttgggagaaatgactgtgattattcattgagtagcttgagcctaatctagacttttcctgactttgcttagagttatgcagtctcacctggcataagacctttctaatgtggttttctccagtagaaattgaggactgtccccttgcctccagatgtctttgctcctgtaagattgtatatacagtcatatgtctcttaacgatggggatacattctgagaaatgtgttgttaggtgatttcattgtgtgaacatcacagagcgcacttacacaaacctagatggtatgacctacttcacacctaggctgtgtggtactaatcttatgggatcactgtcatatatgtggtttgttattgaccaaaatgtcattatgtggtgcatgactgcacatatttctattgtggcactttcaatgtattattaatattcttatatatctgtgttccctaatgagattatgagaacaatatggcaggtacagggcatttattcatatgtgtacccagtactgacatgttggttatcaacaacattttattaaatggctaattgttgtgattttgggtgcactgtaccagacggtatgatcaagacttcaaacatgtcatattttatttttgtctagaagtttccctatctatgtttctcattacatctgagaaatggcagttcgtgggcacgaatctgtcttagcagcttatagttcagtctttaatcattttaatcaaatgactttatgctcatacactgtactgatctgtcttgagatttgatccctgtttgaagcatcaccctttattttcttgaacatttcccttctgtatcatctaagtgctaattctggttctatacctctctggtaatatgtcagtcttgtctggatggtatctgagatatgtacagcacataacccataacaaaattaactttggggaccagttctgaatatacacatgtctgaacatcattttctggcattttatgaatgcattttattattgtagtatagtacgtatacattcataacattcagtttgggaacaaccaaagtcacgacaaatcaaagaattaaggttggtagtatgtggttacaaagatcagttttcctctgtcctttttgcatttattatgtgttcctaacttcactttttagtgattggaatgttccgaactagaactttcttgcgtttatttagaatttccttcggttctacagactctttgtcctgaatttttcatgatccgctttgaaattcttctgcatcttcttacccacgtctctgtattctttatcctttgagttcattgagtatcctggcccttctccttcattcttctttaattcaatatattttattgacgaaatgttcatggagagttgacaacaatctgcctgatcgctcatattttcttatatctaatgagattgttcttgtaagaaatatacaccagaatcctgttgcattctattttttacattgctttgatgctttgtttgaatttcttctgtaaataatatcttaaatcagtgcctttcatttgaaggtctttgaatctatttggaataatgtgactatttttatctttggctccacacttatatttcatgatccaatttggaagtagtatagtgtattggaaagagctgtatttacgcagcctaaggttttgaatcctaggtcagccacttaactgcctatacgaccttgggtaaattacttaacctctctgagcctcagatttctcactcattagtcttctgttttcatctatagtgactttaaccctcatagcctattttgaggctagataaagaaaaatatctgacacgtatacccttcataatggtggctaaatgatgctgacatctacttgagagataatcagaaaattacttttgagtcattagccttagaattatctggagtagattgattgaattgaggcttcttcactctctgtagcatcattgcactgtgttgataatgggtatgtggcatgctttcctgaaggtaattgcacgacctccttcatattgcactatctcttccattttcataatagaatattgtgggtcacctttgccctatcaagtttttctgtttactttccctttgaagaaaagccattcatacgagcctttaccactttgaaatatttgtgcaaaccattaaaatatacgctagtaagtatgtaacatgaggcaagaataaactatggagtcatttttatttcagttcattaggataaaatatatgtcaaaggaaaataaattgtactaagtaaaaaagcaagcctgatagaagtgtggaggagaaaagcacattaattctaatactgactgagaacatattatgggcaagacactgttttaggtttgtcagtgataccaaactgtttcagatctgtcaagaatgatgatttggtcagtggagggccttcttgaaatggaagttcctttcttaatcctcacagtgactaataaaggaggggtgttgagtgcatattgattgaataaagggaaagaccaaaatgaaaagcttaattaacatgactttggaggtagcagaattggaagagaagttagaaacatccttttgggggtcagcccagtggtgcagcgggtaagttcgcacgttccactttggcagcccggggttcactggttaggatcccgggtgcggacatggcacagcttggcacaccatgctgtggtaggcgccccacatataaagtagaggaagatgggcatggatgtgagctcggggccagtcttcctcagaaaaaaagaggaggactggcaaaagaaacatccttttggtaagaagggatgatcagataataagaaatatcagttttaaaaatattttacttttcagtttgggggttaagcaaacaaacagagaattataagtgaacgaaacaaaaagggatcttacaaatgattctatcctactctcctcattttagaggcttagctgagcttaaattcatactagaaaatacacatcttaattcccactatttctgccatagggtgtcacctttcctcttggccaattagccagcaagcatattaccttaaataatacttaaaggtggtcgatgtgaattatttctacatttggggatcccatttgtaaattgtctaaaaaatatggtggattctatgatagctttgtcccaccgctaagcataattatggcgttcctcccctcatgtcagctgtactggtttttgaggctgcagactgattttaatgctggccaaagtaagcttaagttatatgaattcttttcatggaaaaatattgacttttcttttgtttcggttgacttttgttcttcctctcactgtggcctcctatcagtatcacagtggcctaatgtccctactggacaatagtgttgctggaaaaacaggatattacatttgaaaaagaatatgtacaataaaattggaacccttcagtgtgtctactttaaaaatgacaatataacgcacttctctgattcaaaagtaatagcataagaaaataatagagatagcccttcacttgtaataattgtcttacttgctatccatttgtgtgagtccttcctttataaaagtgccctcagacactttccagcatcagttcctccctctaggttaccatatccattactgctcaagcgtgttatccaatcttccctgaatacaaagacaacaatcaatccttgcccataccttagtttgttttatgcttacattagaagaatccatgttgactatggttagtatctgacagtaagtttccttaagaaccttgaaaaagaggacaggctaactcttcattgaaaatcatctcctgtttctgccctacctgagtaattcttatccatgtaatgacaagacgtagcttgcatacacacctggtgaattcaccttcctctagttcattgcaaatcctaagttagcattcccccaaccacgtgtctctagattcctgggactgagaatcttttattttaatgaaactgcagttggtttagtgaaaccaagatttgagaaccattgttcctcagtcagacccatctttgagttactcttattcaaagttgggccttggctaaagactcagcctgttgtaccacaagaaatcctccagacctccagacaatcgtgctttctttataggctcctctacttctgagctgaccattgaggaggcacagtgtagggaaggctgtactgtgctttactaggctttcccaagcatgggtaccatcttttttttaattacccacaaaccatttaaaaatccatgaaacatagctttactgaaagtttggaaataatggattgaaaattaaaaccttaaaattggattttttttcaaagttttatcccctctgcctaaaacagtgcttgacccatagtaatgctcaacacatatttgataaataagtaaacgctaagtgtgactattcccaggaaaaatacattatacctttacctaacattttttcatggatacacccatttcctagcgaggtttcctatatggaggcccacttttcttgttcaggctcctactaggcagatcatcttcttagccaggtattccatcctcagtttaggaaacaactaccccttgtgcaaaaagagttggtcttgccctcagactgaattagagtgcatttgtgagaatagaaaggtagtgattgatgtaaaaggtattgaggatgtgattgtatataaaatattttgagcaaaaaagaaacaaaagtaggagttaaatgcttaactaaaatgtttctttttaaaaaatcgtttggattttacagaaaataaacctaattcaggtcttcaggcatgtttaacattgatttcttctctttatcaaaggctatgtttttccccatgttaaccaaagggagttacatgtttaaatactcataggaaattcagataaataaccaaaacttgtgtgttctaaaggaataaaaccacaaaaatgagtgtttccagactttcaaaatcctgttgacatacactttgctcctatctgtgttgtctaaatatttgactacttcatccgagagtgaacgtgcagattcataaaatagctgcattaaggtttaatttacatatcataaaatcatctcatattaagtacacagtcagtgattttcattaaacttacagtgatgtgcaaccctacaaccatccaattagagaacatttccaccacaacctgaaagatcggtagtgcccatttacaacgtgtcatttccacccgggcccctggcaagcactgaaatgctttctgtctcaatgcctttgcctcttctagagatttcatataaatcgaatcacacaatttgctgtcttttgttcctgtgtattttacccagcgtaatgtttttgaggttcgtctatgtttcttcctttttattactgaataatattcctccacactgcttttagtatgtgttagcatgcaagacaacattgaaggcaaacatgtttgaaactctgaaggatttttctttttttaaagtaatttgtgtcactatagcttctgaaagaattgttataaaaggttaatgatgtatacaattatatgtataatatgtttataatctgaatatatggaaaaatctaaaagtttgtttattcattttattctttgcaattcattctttaaaatattacttttacttaaattcttcttcccacttaatatgaatgtatactgaataaatatttcacttcaaatatgaaatatagaaagatgagttaagttttaatctattaatgacatatcaagagaaaaggagactactgttattgtcatagacagttttagttccctcttgacaagttaaaatatttaatgaaaagtgcttaattgagataagactacttgggaaaattaactatttgttaatcttataatgtcaaacaaagttatgtttaagaaaggtaggattttattcctactcattttatttcactaataatttaaaagggttaggagaagatagagaaaagacaagttataaccagagtcctttgaagatcaagcaaaaatagattgttgaggatcattctatttctttcatctctcctgagtttttattcctcctttctccaatatctcttcctccaactttttattgtacatctgtctcatttcagtcctggacaaatttcttcttttttgtgttttatgaaaagaacttcttttgtgaggggcagggtataaatgaagaatggttggaaaataaaaataaattaaaatagcccatgcacatttaggggtaggttctgttctacctggcttttgtatctcccgacatgtggcacagtgcatatcctatctggaagacatttgattaatgtttactaagtaaaaatgatacaatgtgcagaaatggagaacgttctataatatcctaaagtttcattttttaatgcttgaatttgcctcttagatttcaggaaacttagataaatatttaacaggagtggtatgagataggcttaaagaaagaaagagaaatttctttactatttttgctaaatatatactatagtggattagatagtccaaaggtagagaccctgtgcctttactggggcaaaaggtgaatgtgcttttacacatccctctgcctgtcatccatccagccttggcaaagcaaggaaacactgaatgaaaaaaaaaatctcacaaatcacatggctcaaacatagaatgctgtacattcaaatgaagagcaaatgctagtaatgtggttttctctctatggattggagtgaaaacccattgcctctgatatcaaaaagtgtggaatttttgaaccatcaattaggttgaacaatacaacatagacatggagtgcagagatgggaggggtgcaggaagagtgatcgtgggaagcagtttaggaaatacattagaaattaattactaaatttccttcgtaaattagcgttactcatttactgtgtcattcaacaaatgtttacaaggccccttttttgtgctatgcacagtattacataggcaaaactgacccatagggacacagattctataactggaaaaaaatgaaaattcggaaactacgtctcagataagtggactcatgtttttctcacttggagcatcacccccaggaggaagggtggacgtctaacgtcccatctctcctccacttatcttttcttgtcgatatcagaaatctctctaattcttcttttggtttatgggaccttcccttgaataaatcctgtcaattctctccagcctatggcttacaataaaatactattataaagggaaactggagaaattttagaatttaaaaaatctgtttctataattttagtgtcttggcttttgtgattacgttcaggctctgaacttcaagttagtgtttagaagccaaaaaatgaacctagtccctttgtgttttcattccttctaatcttacctgtagcaaagggatacctctcattaaatagggggggaggttaggtgcagagattgatactattgcacagtctgtcagagactacatttgctgcataaataatgcaatgtaaagagtgacaccatagaggaaagacagattcccctagaggaaatggcagtttgggtgtgtcctacattggtctagaatgaaggatgacttctcagagaaaaagacactgttaagctttaagttttggaagttgaatagcagtcattctacttagagggaattgaatattccagaggggaaaaatcaaagaatgagtgctgtgtggaatagttagaggacagactgttagggaataagaaaggacaccagagagaaatgaggccaggaatggaaagatctcctaagctctgtgaaggatcttggacatccctaattggaagatattgaaggcttttcagcaggatattgactttatctgatacttatgtcacacagactgctgtggagaatagattgactggaggcatggaacagagcaagacagtaaagaggaaaacctgtaggcagctattacagcagtccaggagcaacgtggtggtggcttaaattggagtgaagtagagtggtggcagtggggaaggggagaatattatagttttaatcattattattaattattattgttatgttattatttaaatagagatttaaacaatatatgttttgtttttttacaaaaacagaagttgagttgaaaaaaataattaaatccccagatatccagtccaatgcagtcctcagttatgataatattttggcgtgtttctttcagtagcacttggagcgcttcaccaatgttgacaatgatgtatacagtgtctgtccgcttcccgaggccacacaacggcaacttttacaaatagagaaaagtgaggctgccgcacttgtgagaggtctgcctcagctcctgtgcggtgtcaaagctacaactgaaatctctttgcttgtgattatttttgacatcagaatgacccctgtgcaaattcagaaggaaaatcaaacttatacctcttttgtaattatccacctctgcctaactctaacagctggaggcagctcaatttctgcatctactatgattcattggcaggattttgtttcataattttttcctaaatctcttctgcgcatcccatctcttcttggattggttctaacagtgacttggcaggcagcaaagccaaatagaattttaaaaaacactcaatctttttcttcttctgcttgcttgccctcctatgctttgattcctttttaaaaactcaataatgataaataacagtagctaatcaattttgaaccctggcaggtgcttgataccatgctaagtactgtacatacatcatcatatctagttattccaaaatacatattattttattagatataatagatattatcattatctatattatataaataagtgaacagaagcttctaagatcaaataacttaatgatggagatggtattaaactcaggcgtctctaactccatatacacatatggttatacagttatactatgcattctcttccatgaaaatcatcatttttgtcatcaccttagcgtatatatcagaccttggaaatcaggaatatgctctaggaaactatctaggaagctattgcttgggatgaaggggataatcccctagatatttaattttcaacacaattgacattccagatactgtgcttggtgctagacctgggaataccattgtgaatgagttgttgtctcattacagtgtggacagtgggaagactattgtggcagaatagcgactgcagctggagaatgcgtcagccttgattcacttgttaggagcgcaggtgaaagttccccacggaaagccctgcacaggcacggctgttcctgctcagcagccgaaggaagtgcaactaacttcctgtctttcttgatttgcccttttttcctttgcttctcatctccatctctgaataatctcattctagtttcaaaccatcctcagaagaaaggaattctttttacccctgcttttgtgggaaaacaactctccatgaatgttttcatgtttctgcatgattggagctttctgagcaaagaacattggtgtctgggttaaaggatgattgatgagccaccctcaaggtaaagagctccagagagatataaactctgatctctccccaggagacatgtgattacattccgcggtggtggagtagagaccttcccccttccctccctaaataagagatttggcattgcagagcaaaatcaatttcgctctctccagagggcagaaggacagatgggaaagctaccctatgtcagctgcaagtttcctaattctggggttcctttcttagggcacaaacctcagtgtgtgtgcaggacacattggttctcactgcatcacctttggatatgaagacctgatacaggctactctctgagtaaataaatggtctgatccctaatccagaggtcttgtgttcctgttagtgtgtgtatgtgttggtatgtataagtgtacatatatgtatatatgtggacatagacacagatatagatagtaacatcacagacccttcactctttcaaacttaacgttatccagataaagaatccaaggctagaaacatgttctcattatttctttctaggatgattcttttgttctactattctttgagtttctgtacaggggcccaaaaggcctaggtaatgctaccattaaggagtattggttcctgcctctagcttccctttaggtactcacttccatcacctgttatagtgtttaatttaggtcacactgagaaacagatttctggcaaggagaggcaatttcagaagtgtgtgcccttgcccgatggctccaactctaactaatggcccaggattcatggtaaaagtggaattctttattgttccttatggtcctgctgttatctgaagaggtgtagtaaggactactttcctcccaacagagagaagaaaaattggaaaactgcttttgacctctcatgctagggaaggactttgctgttctggaatgttctctcctattaggtgacatgggatgggccaatgcgaccttccaaacagatccaggtctgattgagtctcttcaggagattacgagctcttttctgtcctgtttgcacaacaggacagaggagaacttgggaatgctaccatatttagtttattccttaaagccacaaaaccaggtcacatattttagacccttagagataatcccacatggagtttctctttttcctctttttcttttatcttcccacaatctcttttgaagtccgttgtcccttccctccactacctttcaagaaacgctaacgtgatggaaatgcaggtcttcaatctctcacgtttcttgtgctttgcaagttcttacctgatgtttgggcagatgttaaacatggtttccttgtgtctaggctttgctgggttagagggaataggggagctgatctctggagggagagaatgatgatgggtgctaaggttccagtttggacttccaaagagtggagacagccatcagtttccttacaaaaccccagaggcaacatgctttgctccagaaaatatgattttttttcaaaggcaacacaatttcacatgcggaaattatcttcctcctattagcatgactttgacctgctcatttcagagtagcaactttggcatcattgtttaaggaacatatgattctgtcctctgtctgagtacatcagactggaagaattcttcccaaatcaattctccccatatattcccctgacgtggaggaaaataggactgcactataaatcattctcaatgaacttacatattttgtgagattcctccttcacttctgcctttgaaatcaattctcttgagaaatatgtgtgtgctcgcttatatttgtaaatttgagaaggttaaaatgtgtttaatgctcagtgcacttcattcatttcccttttttcctgtctttaaatcattttcttttgtatgtttaaatgatggttaactattaagaagactaaaatagacaaagtaattgccacttgttcctttgtctctgtgtgacttgctgtgctataaacgtatttaatctagaccaaactggagaggtaaaacctaatttaatagctatcaatcacaggcagcaggcctgcaggaggagaaaataaaaaggtggttcttttatgcagtcttctctcaggaaacacaaagtgaaacattagacactccgtatctttacaagataccttctcatccctctaccaaattacacataatttgaaactctatgtattccatttccacttttatgccactacccttatattacaaagtgtgtgactgacatgttagttaaaatatttaataagaattaaatgcattgggcttcgttagaaggaaacagagcaacttgatatgaaattcaaatactaattaaataaagcctccctatgtggagctaagcagatgcttttcttagccccacaataatgcccgtggctatgccttccagccttctattggtgagattgtcatcctgcgttgcctgtaaaatccttctagaagcttctcaatttactctgattaaatagccaaagtcagataagttcaatggcttaccaatctgctttatttctctgatgttatcattccctaccctccttactcacttccatgctcactctgctccagcctccctggcctcctgggttttcccctcacacatgagatgctcctgcatcagagtctttgcacttaacagttctctctgaaaactttttttaaagatgtgcacatatctccttcctctcctttagttatcaccatctcagtagggctatcctaatcactctatttaaaattgcaatccagccacctccagcacctcctatcccacttgcttgctttttctccataaaacttatcaccatctaacatgctctatatttttcttacacattttatttatagtttgacttcccctgctagaatgaaagggaaagaattatgtttattgttgtatccctagaccagtgaccaacacagggtaggcaaacaataaatatttgctgaataaatgaatgaatgaacaggaaagcagtctgttgtgcagaagctgtaagtaatttcaaaaggaaattgagcataatggaattggtagaaaggttacttggggcagagactaataaccctgtgataaataggttcaaccactgcaggctgcgttataccaatccatgcactttacttaaactctaattttcctcagctattgaacgtattggttcttgtcaggagatggaataagggacagagtaaagaagctgaagattcatccattcatatattgatggcttctaaggaaactgggaaatgtgcagagctctagggataaaatgatgaatataggatctagtctctgtctgtacttagctcatagtgtactggggaaacagataataaaagaactcattacaattcaacattttcaatagtatgagtgctatataagcaaggttctaggaaagaaaagaaaactcaataagctgacctgcctatagagatttgggaaggtggtacaaaagaagttaaattttatctggatttttatttaagacacttccagttacaagtaatggaaaactcaactcaattagacttaagcaattaaggaaatttattagcttaagtagctgaaaacagccagcggtagagaggacttcagagcttatgatcaaagctccatggtcatctttctgtgagtttcccaggtctggtttctttcatgtggcagcgtcattctcaggctagcttctctcagcttggaaatggctccatcagtaccgtaccacatttcatatctgcctaccctactgctatgccatccacatcaatagttggttttctcccaacgattgaataaaactacaatggttaatctagttggaccacttaaggccacttcccactctttaggttgttatggtagccaggaaatgccatggctaactgacatatatctgggttacctgcccaatcctacactcaccactggagcaaggggaacaagattagggtctctggctcatagcagtaaaggtctatctctgaagcaatgtgtcgttgtttgacccaaccacagagcagctacacaaatgggaagcatcagaggaatgtttgcagagcaacttcaatatgccctacaatcttaaaggatcagtaagaactttccagggagatgatggagaaaagtaatgttaagggtagaaagaccaccacatataaaattgtggaagtatagaatgacgtatgatgtatactattgtggaagaagtgtgttggacatgggggcagaagagtggctggaaataaaacccaaaatgagactacagacagattgtaatgactcctatatattttagaaagaaatgagatgattctgagaatagtttaaagctttgggtcttttttaatcaaataaacatataaaaataattgattgtcaatgaccagcaaggtgtggaggaagtcacagaaacagaagttatggtcccaattctccaaaagctgtggagacaatcaagttggttaatcaaagtagccattgaaagtgcttcattgtcaagccatgtaccaccaacactaatttagaggtcagataaagatctgtgagaactggtagatagtggaaagctttaaggaagaggcaacaacctggagaaaacttggaagatgaatccatgtggaacatattctttgtgagacaggataagcatctgctaaggtagaaggttaggtaggaacattgtatgaacaaaaacgaagaggagaatggctgctagttgtatatacaaagagcagcatcgaagagctgcaaaatggtaagaccaaaggcttcagtgtcttcaatccaggctctggacaatttatttctcttacattctgttttctcattggtacatgagaacaagcatctctttctcacaaggtagtacactcaagagctaagagaaactgagatgataaagtgcctcgtatgtggagataatttgtgatcgatacatgtagctcctatcctttctcctctgatgaggataataaggaagagggggcccatgttgatgatgaataaagagaagttcagattttaactacttagtaaaaatactatagaaaataaaaaaactgataagatgatcctgacttctcattaacaagaactgagaaaagacattttctttggccttcgctgtatttggataataacagtgatgttgatctccatttgatttttgtaacattaagaacaatcagccaaaggttcattgatagattttccatcatgattgatccttatataccataagaagactgaaccatagttcaaatattgatatattttcctcactctccaaaagtaaaatttcccggctaattttactcaaaaaacaaaaattcacaattacattaaagcttgcttttcgctaacatagactgtttgcctcttctccagcctcaaggcatctgttccttaaattttactctacccaaagctgagaccctcttcctaagcacataaggatttttacctaaggcagcatcaactactaagataggctagctcaaaaatgtgatgtcatttttgaatgagttatttctgacatttgcaggcttcatctcttttatatctctgtttcctctgccattgcccttctccaggtcacctctactctgggagactaaaatagacccagtcacctttcaatgttgtctgtctctcaaccatctgatccctttgtcaatgttgccagactattattgtcaagacgccaccaccatcatgacatcccccatttcaagtacctgcagagtgtctgaaagatcagaaaacataggatgaatttatttttaagtagtatgttttctttagttatttatcgctgagtaaataagtaccctacaacttattggtttaaaattatcaacattaattctatttcatagtctcctgtgggttcagaatttggaaacaacttggctgggtgatcctggcttggtctttcatgagattgcaatccaaatgttgggcttcggtcacctaaaggcttaactgtggctggatgattcactgcgaagatggtttactcacatggctggcaaagtggtgttggattttgtaggagacctcagttcctctccacctgggcttctccatgggactgcttcagtgtcttcacacctgaaagctggcttcccccagaaagatggatgaaagagagagagccagggagaagctatatccttttgatgaccttgcaagtcacgcagcaagtcacttctgctacgttctgtggttagaaaggaatcattaagtccgacctacattctcagagagtggaagtaagcatcggctttggaagggagaactgtcaaagaatttacagacctattttaaaactactataaccttaattacgttttccaggaatacactcaatataatttccttttatctctagcattttaggtaaaaatacctctgtatttaaaggaataagtcccatttttaatctgagcacagtaaagtaagtatactgttttccctgtgttttcaggctttttgaacactctgtagtgtattgtattcctgtagaaggagttgcatcaactgcatttattacaaactgtgcttttttacttttttcttctactctcccaaaatatattctggtttaatcaggctggtctttccacttttccagtgtttgttgttttcattgctacctccatggttttactgagactcttcctccttcctctgctctgccttttaaatccattggcgcttatgaccaattcaaattcaagtctcacttttccatgaagggttggctaatacctttgccatacatggtcccctcgattctgaccactcatgcacactcgcttattttttttgcctgattgaattcagttcagtacattttatccatctctatttctataataatgcctgtacattgccagtactaattaaatatttgtggaatgaatattagattaaaagattttatttaacccaattatcccaagtattatcatttcatcacacaatctatataaaattattaataaaatattttgtattcctttttgtactaagttttcaaaatctggtgtattttttacatttctcaatgcatatgctaaattttcatcaggaatatttgatctgtatttatattgcaaagaacttatagctcaccaaagtagattcacgtacacattattgcaaaaattcttaaaagttttcagtaaccaaactgagcatccattgttaaatttaaataacataaataataagtttctcaatctcactagacgtatttaaagtgctaaatagcaatacgagactggtaagtaccatattgaccagcacagaaactctaaaatcagagaagaaacaaacttaggatgtcactggattataaactagcctttactaaaagcgatgcttagaagtgaaaaattggagggaagtatagctcatatcaacaccatgtatgatcagactccacaaatgaaattttgttggcaaatcactataacaagaattatgctgggcctccttatgacaagcatccacaccttggttgttacatctaaaataaatgaatataattccaagttcaaactaacatagcaaagtaatctggctttaataacatttaccaaaaagaatctgaaggattaattaaattgcattgcattgaaacaattgaattgaaacaattgcaccaaaaacaattgcactgcagtgaacatagcaaaacatcccctaatacttgtcaaggtcactctccccaaaccctcacaccacaagaactgtaccaatgtctctcctctttgtctccgcctcaaaccctcctcagaaatcctcagcctatactcttccggtgactccttctcctctctgctcccttcctgaagctttataatatgtcaatataaatttcattcttgtaatttatctcttcacacattcttgtggttagcaaaacagactgcctcccaaaacctgagcagatcaacactgaattctcggtgaggaggggagagaaattaagacaaaggatttgagaagtctctgaatgccaatgtttttctactgtcatactagtattaagataaatttcaacttgtgatgttcttaggactgaaagactttcactgctttttggttaaaaagtctgtattaaaaaattctacaagattttgaaatgaaccaaaaagattacgggctatcctcaatgtctacaggaattgacttgtttttctgattctgtgtgctctctgtgtgttttgagctgttcacagctctgtaaattatccacagaaactcaaaattgtgtcctctggagattccgttgttttttgccctgttaatattgatcagttttgccagttttgcatccactgaacaaacttacttcagcattcctaatagcctacatttgtgcggtttgtaagtctctttacaaccgaatatacatcttactctctctccttaattaaaatatttggagtgaaataagaacagcttgtctaataaaaaaaacaaaataactttaattaagttatattatataccctaaaataaaagctggcaagggaaatagaggaatgagtacttgtcaatttttagagagttccaagtgtagaatagtgtattagttcagagtttgggttctagtactaaactcatatcaattctaaccttgccaccaaagtgctgtgtgaatttgttcaaggtaattagctcctctgaccctgagtgtactaaaacttaaagtgtttattcattcattgatccatttattcaacaaacatttatgagtacataatataccccagatattgttcaaggctctggcatacaccagcgaacaagagacaaaataaacaaattccttacttcatggagctacatccctttggtaaagactgacaacgcttaataaatttgttagggaatgaccagtaattataagtacaatgaggaaaactcaaatatggagagaagctgctttggatagggtttcagagagggtttctctatgaagtgggcatttgtggagagatctgaatgaagggagaagtgtgctgcgtagctctctgttctccagtcagaggaaatagcatgagcagagcccagaggcatgttaatgaaagcaaagctcaacataaagagtctagattgatggaaggctgagaacaaagaggaggtgagaggagagacttgtcacaaccatatagaattgcagttactctaaaaatctattgggttccgtcttcaaccatggatcttttacccatgcatgatgttgtaacatcatgtaggagtcatttggaaaatactgattcaatgagttatgcacgtttttcagatgttgtcatattttattatacaatatcagaaaattgcattcattaatgtcactaccgatctcatcatggtggcagatatgagttttccaaaattctaattccttcttaaactcaaaatgttatcattagccacaaatactgtcaggtgtttctttgaaggagcaggctcactattcattttcaagaaaatgtctgccaaatatccaagtctgaataactatagtttgtcagttgtgctcttaagtaaaaatattgacccttgaaaaaggtgacaaattcagctcagaactcagacaattacacaagtgctgttccttggggcaaacattatgtaggcaatggaagtaccttgaatatagcttctattttatcacaaagaatattaaaaagacgtgtgctcaagagttgagatttaataaaattaataatttttattgttaattaagtacattcttaactgaaactggcctacttgttttctgccggtgtctgatggtgaagaacacgatgactgttagcacagtttgatgccacaactaagacactcgcagcttacccacctctgattttgtaccattagcgtaaatatcaatccagtaataaaagcagatgacatttagtataattgtgaaaacattcctgcctatttgattgatgccactatttatgtcctctgcactatcagattaggagaaaaaggcagaaagggatctcaatgcccccttataaagaggttcccccccacccccgaaaaaagtcttcacaaagttctctaagttttccatcctctcagccaggccttagtccctagtcacttatctgtaagagaggttgagaaatatgggcttttagctggagggcaaggccttctatctttaagatttaaaagatcacaggctactagctgcgatggacagagacttccctgacgaggaaatgaaatgtcaggctggcccaacaaactaaaagcagtttatgtctttgcaactaatatttggattaatagtaataacaataataatgataatggctggcatttattgggtccttctatatgttaagcatgatgtttagggctctacagacattattgaatttaattctctcgaaacgtagaaaagataagcaagtcactgagctactggtaggcagcagagtaaagatttgagttcacatctgtgcgacttcagagcctgagctcttcactctaccattctaagcacctccttgcctgatatattgggctccaatagtaggaaaagaaaccctggtcaggtgtttcattgaaaggttctagtttagagggtttaatagctgaaatttctacttttagttgttagattattacaaaaaatttagccaccctagatagagctatgtcgtagtttagttaccacttatctctttgatatgtgataaatgaactgcaattgccatttgtcccaggctaatattttactctcaatctagaagtattttctcattaaaatgatgtatataattcatttattgtttggttcatacacaatatctataaattgctctaacattcttagaatatgtttacaatactgtaaaataacagcttttaatactagatgttggttagatcttttgaaaattgttaatattttatatacgtgtatgtgtgtatacatgtatgtgtatatgtaaactaatatttatgtttatatgtgtgtttaagattagcatacttggaaatagagaacgaattaaaaatttaaatgacatgaggaggtatctcagggcagtaagacagatagcaatgatgatgttatacatctgagatggagattcattcaaccacagatatttattaagtagctgctaaatggctagcactcttctagactctggggaaacaagagaataaaacaatacttgctctcatggagccaatattctaaaggaggcagaaaaacaataagaaaccataactttgttgtagtgaatactttaaaaaataaagctagttgaggggaatagagagtgatggggatgggagatacaaatttattgggtgatatctgagtgatttggaggagcaagctgcacagctacctgctgggagagctctccaggcaaagcaaactgtgagttgggagtgtccttggaatattcaaggaatagtaagaaacccagtgtggctgcaggggagtaagtgaaggacaagggaatcgttctatcaggtcagagagatgaggcggagtagatcatgttgaaattttaattttattctgaatgcaaaatggaggaatgaacttacctggatgttgagcaaaagagtgacatgaactgacttacattttaaaatgtatccatgtatggcagtggggctactggatggaggacagcttacagacagtgaaagtgacagttaggccacttcttaggaggccattccaattgtagggaggtgagaagatgatgatatggactgaaatgatagcagtggaaatcttgagtcatagtcaaattctggatgtattttaagtgaagagccaacatagtttgggtgtgaatgtagatggacaataacagagatttgaggacacaatcttggagctgccagtatataaagactgatagggggccagccctgtgactgagtgtttaagtttgcgtgctccgcttcggcagtccagggtttcgccagttcgaatcctgggcatggacatggcactgttcatcaagccgtgctgaggcgggatcccacatgccacagatagaaggaatcacaactaaaaatacacaattatgtactggggaactttggcgagaaaaaggaaaaataaaatctttaaaaaaaaaaactgacatcaataaaaaatggagactgagaaagaatagcctggaggtggaaagaaagctaaaagcatctcatggaagccaaaggaagaaactttttcaaggagaagaaagttatcaacagtgtcaaatgctactgatcagtccagtaagatgaggactagaaaagaccactggacttgagaaagaggcgtcatgttgaccgtgacaatggagtgatgtagactaaattctgactagagtgggcttacgggttcatgaataagtaagagaggggtgtcgaagcaaaggggtttaattgtaaaaggatataggaaatccctgtctagagagggatgaggggcccaagcaaggctttattaaaagtaaaggttattatagaataactgtatgctattaatccagcaaagagagaaaaatggtgattaggagagaatagatacatcccagagagacagtggggtccagagcatgagtaaaagggtaggcctaagatccagacctggctgtgcatctataactggagggcgcaatgtgtgcaagcaggagcaggtgagagattctgtagggcgattacgtggatgctccattctgaaggttccattgtagggctgaagactttcagaaatagcagtaaaggacatggggaagaggaaaagagtttcatctatgcctgcaacttccttttttaggaaactagcatgagaacggagtcatctccacttactagcggccattgggggattgacaaggcctattagccacttaacaccttgtctttctctatgaacagaatcccatgatgagatagtcctcttctgtgtgactatatcataccggggattgtggtaatatgaagagacagagtggtagatggaaatttcctatgatttatttgctcttcaaggaagtaatagccacttatgcttccactgaagaaatttgaatttgcagccacaagaaaagtatcgtttttgaatactccactttctcaaaaaatatagcattcagatttggggaaattgaagtaaatccagaaaatatatctacccagtgaatctgaagaagaaaaatcattttttttctcactctgcatttcaaagcagttaagaatgtgcccactgtaagtaacctggaggataaaggacatgcttttaaaaaatgaattacatcaaagaccctttaatgccttcttttaaattaatagggcattacttgctttttcatccatgacatgctaaaggacttccatgcatgtggaggtatgtactttgagggaagtaaaaatcagcaccattctttcattattaaaatatcaggggctaaagatataaatagcatgagcttctgaaaagtaaagacctaaattctctcttcattagaggactactctcacgcttgtctagcacctctgttttctagaacttgccctccctagagaaaggtcccagaatcttgctaaattatataatgggcccatgacataagtataagacaatgagctatgaattagcacatcagactcattttcactggtaacctgattttacaatgtacatctcattgccataggtaaaagcagacagggtcctgtgctccttaattctgttgccagcctttctcaaccaaattagtccaagttttttaagaagctgaaagtgattcctttttttgctacattcacacctgaaacaggaaaatgtcagtttgtctcaagttcagcagacccacatccaatgcaggcaagttaacttactgctgagttttgaacagtgacaccttaatagatctgccccagaaaatgacaaatggaagcgtttggggagccccttgggtttccctttgagtatgggcataggagatttgtaaaatgggacagtcctcacacatttcattccttaaagagaaagtccatatttttcctcacttgagaaagaaagatccaaatgaggtcattctaggctgatggggaataaaatgaaaataaaactgagctgtatacattttcaactagcaatctttaagagagaacaggattagggcatatagagcctgctggttaaatgccctcaaggaaggcagaacagcttggattctagagtcaacctcactgggttctagtctcagattggcaactatcatcagttacccactctcccatttgttctctcacctataaaatcagggttttgctaaaggtcttttccagctctaaaattctacatatttgtggaacacagatctaatagagtttgagttctatattcatgagcctgaagcaagccagcaccacgtaacccgacctgactccacacccaccattagctttgcccttgacaggctaacatgctaaacagcatcactatttttagaaaagcaggagaaaggatgaaagaaaggaagggcagaggggaaatagaagggaaggagcaggaagaaaatagaaattggtaagagggcatttgtccaagatgagcgctccagcccaccccacacaacataccactccaccaaggtccagctcatatgccatctcctccaggatgggtgtttttgttctctctcggaccaaagcaacaggcattacagtcctcttgttttcacctgtatttgttcctctggacagagtgaagcctttgaagtggaggaattgggaccttcttacccgcgttcccccacaatgctctgaataatatctgaggcataggcagttttctgtaaatgcctggtggaataaaatgaattaaactgaaccccaaggaagtcatgcttagcctcgaggcagttactactgccttccttagtggataagttctaggaccttgaaaccgacataaagataggatcagggaaggaaaaagggactggaacaatggtttgataaataccctgccttttcttttctctgttatgtatgataactaattcttattcctctaaagagaagtatacaaaacagctcactatatcccgtgatattatttgtctctttgttgttgctgcagatccctttcctttctccactcactggctttgctccacatctagaaataccttgctataggaatcaagattagggttatcagacttcccaaatattgtgtgggacatacatatactgaaaagttatttgctgtttatctgaaattgaaatttaaggagttgtcctatattttacccagcaactctagagggaactcaagtggcttgaaacccagctcaaattggcttcaacaacaacaaaaacaagaatttattggtccgcataactgaaaggcccaggcggtaattctgggcttcaggtgagacttaatttagtatgtcattaggaatccatttagtctctcagctctgtcttctaccctaatggcttgattttctggcttcccgtggtgctgggtgattgcagacaatgcctgcctcatatcctgctaagaccaatcgaagcaggtgagcgcagctgcctcctgatcaccaggcagccccagcagaagctgccccatgcctcatggcactctctgggccacatgcctcagcctgaacctacactctgctgagagcaacagcatgctctgattggtcagaactgagccatgtgcctcactcacccttatgccccactgaaggtgcctgggctgatggtgccaggaggagtagtgccctgcaaactgaattgtggtgcctaaatcttctcagaaggaaaataaatgctgtgacagaagcaaaaggaagacaacccactcaccgcgcttgctataagtttctaaaccacataatttttcaacgagatttttaaagaagagttggcagcagaagctctgggcatgaattctggttgttctactaaacctgttcaagttgctttaactttgtggtcggtttccacaggtgtaaaaggaggaaccaggtaatagatgatttctgaagtcctttctagcctagcatttcccagtactgtgaatggtagcaggagggagagtatgagagaaggagagagagagagaaatgccagtgcattttatgtgttcagggccaaactgctgatgctaggaaggacagtcttgcgtaaatggaatatgagttttatttatacgaaccactctagttagtttgtttctgcttttgtaggttctttgttcctatttaaaaaataaatttaactatgcaaatgagcatatgtgtgtgtgtgcattaaaattactgttcagtcactgacaccaagttgtttgttctctccaaattaatttattagagaggaaaaggaaactgaaatctcagaagagtgatcaaacttgtgattttcatttcaacatagcatcccattaaaatgacatagatcatctttgcgccatgggattagtagtagtttgtgagcttttgaaagccctttgaaatgttcagattaaaggaattaagttagattttaaaataacaaatctaattactggtttatctgaacattcaaatgaagaagaaagtcagtttcctttcttccttccttcagatgtcttttaatttgttctcttaccaaagaaccttcaggttcaaaggcagttttcatcattttatcttaaactctgggagaacggacctgaacagacttggccagagccccatttggggaagaatatcaagtgtaaagtcttgtttcagatttaatttttaatgagtctgaatatgaatatgtggctttgtctttcatgttccctgttttttgtattttctttctatttttgcctcagctaaaggttctgaagcaacactctcagatgcagaggcagatgcaatgtaaatattgtgttttatttccctcactgggaaaacatgagaagttagattagtttcctcttgtggtggtaataaattcccacaaactgagtggcttaaaacaacaaaatttattcttcatcattctgtgcagcagaagttcaaatttgtttcactgggctaaaaccaaggtgtcagcatggctgggttcctcctggaatctccaggggagaatctgttactttgcctttttttccgcttctcaagacctcctacatcccttacctcacacccctcattactccaaagcttgtttccaccattccagccccttcttttgactctaacccacctacctcccccttgtatgattcatgtgactgccttgggccaactcacataaaccgatcagggtcaatgaggacttttacaagacctggctccatgctttactatctatgtaacttttgttaatttacctaatcaactttaagcgtcagaatcctaatttttaagatgaggaatagtaagaatgtctacctcgtatagttcggggaagaattaaatgagatcgcatgtgtatggtctctggcaccagtcctttctataaaggaaatgtagaatatatatcagctgctcactcacataaagggaaaattagaatgaaaatcatgttttcattctgagaagttcttggatgagatagaaccaaattgaaagtttgtggagaatgaattttatttagcccaaatggctagtttagaactttgaaatgatttgaagtatcaaattaagattcattatagtttctttgaaggtttgtttctcctatgtcatttacaaggaagtattttgatgacttgatgatgatgatgatggtgacaaccatatgtatttgactatccctataaacattttctctatagacagtttctaactctcatatttatagactaaaaatacaaagaattttccatgttcatagagaatactgtaaatattttaatagaacatacatgtttttattatgtttaacagtttgtgtgtgtttcccatacagtaagagcttccttaatatcaggatcatggcttattttttgtgaatctagcccttggcatatagtacatgttcaataaatgtgaatttaataaaagaatgcccaagcatgcaaacccatttattcaacaatcttaaaggagaagtttcaaccaagacttttttcagttataggggaaaaaataactgagtcataaagggaatttattggcacatattactaggaagcacactgcagctagttcaaatcaaaggatgatctagaaagacaatatttgaagactagaattggagttcagaaatagcaagacttgttctagcagtctcttgtctttcattttctctgcttcccattgtatgttggtgtcattctagcctactatagttagccttcttaagtattatggaacatagtggtcccatattcccaggttagcaaccttgcaggatagaagagcctatttactcatatttactcacatgctctgttatccatatgagtaatcccagaaaggaacactgattgaatatgatttttaaatatgtttatttttcaattaatcacggatgccaggaagatggaatacttctgtggttgtgtgtgtcagcagtagggagaagttgaagaagtagaggtaggactgtccccagaagaaaaggagaaatggaaaagattgccaaaatactagatactatggtctaccataaaagttaaggagtagcaaattttttcaatttaaaatactttcttcctttcatttagtaaaagagactgctgttatggaaattgtggtaatactgaaataatccattgccattatgaaaccatgaatttttattttcttttcctaaacttgttcaaagaacctaggattttctataggttcataattcttcctctaaaggatgctcagtagataaacaaaaaatataagcttattttaaggagaataagtaatacttcacggagtaggcaggtaggaattcaatcaatacttgtggaatacatgcattatttggacatttttatcagtggatttggaaccataagttttcatatggattctgtagattctggatagctatatgataacttattggactgttaatcaacactttgctaaggggtcttcaaagttaggtacctgagtataaaagggcttatgtgttagatcagtgaaaaatttcaattatggcagtagggaacctggtaatcacaactggggaagaaaatcatgaaacattctaaaaatagcatcctaacattattcaaatagtttgaaaaggtaaggcaagattttgatgaaaatatcagttcttgataacgtgaactttttgaggttcaaattaataattaccattggtctataggacagctttgttttgcataccaatgaactaatgaatgtcagacctaagatactggtcatcttgcagcatagatttccaggggctcattggataaaaggctttcttccttagtctttgtaatggactttgtaaaaacagttagaaccatgtctgtataggtataacatgactctgcccaatggtgtcccttccttccgttgcttctgtatagtcagattttcttccataatgtgaactttgttacacatcttgaagataagatctcagagttaaattaattggaaaaatatcttctggatcttcttttaaggggggaaaaaggaaataacaattcaacactcaagcactaaagtacttttgacttgacattagatcttgtgaccgttccccaccaaagataaatatctgttctggtggacatttgaaagaagttttctaataacgatctgacagtcttctttaacagatacgtcttggatacagccagatgtccacctattgattaaatttttccagggaagagagacaaatctttgaacaatacatcatcacaacaaatttgatttcattttatgtttatctttcaatgacaggcttaatacgtaaatcagtgtgtttaaaaggaagctcctttaggtttcttcagatgatttattgccttagttacattattgcttcaggtgtaatcaggaatatttgtcttcatgtcattgcaatagagatatgggataaatatgctaatgtgcctgtctttgcacataatgttttattagtcttttgtttgtttcagtctcttaattagtgacagtcatttaaagccatccgtctttgttcaaatttatgcaaatactataagttaataatgagaatttcaaaggaccctgtttatcagcccttattttgtttgttagtctattagtttgttcagctaaacataatgtcttcctttaaagctataaagctaaaattcatcaatcaaataattattaaaaattcttaagggtaattttctgtttcacatcagaggacaaatatcatttgtgaaattcagtcattcttcatatatctcattatttcttctccctcaatgcagcgcccatccatatcttaagtgactgctcaggagcatgataaggtcctgttaacatttactccaaaaatgccaccttgaatttattgactcattgcaatttaaaacagaaccctcgtagtttactaatggtaattggagttaatgctatagaggttgattaaaatgcttgttggtaccataagaaatgcacccttaattataatcttcttgatagttagctcacacagtcaagacaaaaattatcacttagtttacagctttgcatattcattgtgttcttacaccgtcacatttgggttacattgtttcgttctaaaactcatatagcagatagtttggaagtgctgatgtaaacttctcagcagtatattgttgaagtctcttccaatttattgttattatgttcctatggaaagtatgaggatcagtagttccagtaaaatatcacaaatgctttccttaaaatctagatgtttccagagactgtacttggtcgtaagattaatgatataatccttgggctcagatcatttacaagatagtggtggaaatagacatggactagactttagtctttctagggtcagggactggaccatatcctctgttatgtctccactgctttgcagacatcaggaacatagtagatacacaagcagtactgattggaatatgaaaaggcatacgcacgggaaagggaaaggaatgtgactacaggagtcacagtaaatggcaactttgaagcagatgcctgtagagtcagtagaatttttccaggtgacaaaagagtgaacatttcctttaagaaactgggtaacttgtggttttctagatgtgtaatgtgcaggattagagaatgacatagagttaggctgcaatgataagatgtgccaagaatggatggctttgagtggcatgctgaggagtttgaatgttattctctgtgttggaggagccatcaaaggtgcacattcaggacacgttcctgatagaagttggagaatcagagaaggtagcagaacagaggatgagctcatgtactccaataagctcaggtggccacctagcatgaggaaaatcagcatgcagactttggtgttagctaaatctaaatccgtcacatttttagctagatgaattactccatactctaagctttagtgtcctaatctaaaaattagtattataatactaatttgaaggattactttttaagtattagagattgcaaatatgaattacttgaaatatagtaaatgctctttaaatactgagaggatatagaaattaattcatattaatactatttagtactcaaatgatccaattaaaaaaaaaggaaaaggatctgagtagatatttcttgaaagaagctataaaaatgttcaatatgcacatgaaaagatgctcaatatcgctagatattgggaaaatgaaaatcaaaaccacattgagatactgcttcacacccagtggaatgactataataaaaaacacagatacaaacaaatgttaacaaggacgtagagaaattagaaccttcatgaattgctgcaaaagggtaaaatagtgcattcactttggaaaaaaggctggcagtttctcaaaaggctaaacatagaattaccatttgacccagcaattccactcctaggaatatacctgagaaaaatgagaacatggatccacacaaaacttgcacaagaatgttcatagcaacgttattcataatagatcaaaagtggaaacaacccagtgcccatcaactgatggatagataaaatgtgttacatacaatggaatattagtcagcaataaaaagaaatgaatttgtgatagatgccacagcatagatgaacattgaaaacattatgccaagagaataccacatactgtatgactatttatatgaaatttatgtgaaatatccaggacaggcaatgctatagagtggttgcctggacctgtggtgttggggcgaaatggaaggtgactgctaagaggctttagcagtgggggtgagtggacaaagaagatgttcgaaaatcgtgatgattgttatgcaactgtgaatatactaaacaccactgaattcactcaatacaattcaaaatgtgaatcgtatagtatttgaattatatcttaataaagttgttacaaaaaagtgaaaaagtaataattgatacatatgttgagtacttaatacatgaaaagtgatgtacataaattgtcttactcattgaacaactttccctatgaactagagacatttttaataccattttacaggcaagaaaaccacaacttagaggtataatttgtgagtggaaaaattaggatgtttattaattatattatatatgtatattatatattattctatgtatatttattataacatgtattatacatatatatgcagtatatataatatgctattatactatgaaataaatatattgttaaaatactggtaatcagtatagtttacttacctgtactaatttactagcttctctcagtcttgctcaggaacctattctcaggcaacaagtgaccctctcgaactctccctagtattgcagttttgtgtgtaagtgctcccgacttcaccctagagaaaggactatatctggctgtctactgattcctctttctgagctgtcccggacatcagttatgcaagttgagatattcaagagcagagaagcttcatgcaaaaataaccacttagcacaacacctgcccctagtaaccacttgaacaatagctgaaattttttaatgcttctaagttccaagtatttttatgaaatggctttaacaagcattattttattcaatcatcacaaaaaatctatgaagggagaggtaaggtgaccaactcatcctggtttgctgaggactttcccattttagcacctaaaataccacatcctcagaaccccttagtcccgggcaaaccaaaatggttcatattgactcaacctcttaaagaggttcatattgactcaccttctgaactaggaatttaacagtgttcattgttcctttttccaaaaatggaaagtttttcaagtgcaatttctaatttttgctcccttttacaagttatttttgatgacatatcatttatttattggatcaccaaacttcataaagagaggctaaagacattctcagaacagtaagcaagcgtattttaggaaacatcaacaaaagagttgatacagtaattaaccacacctgaaatctggtgtaaaatataatcacatgttgcatagaaacttttctattaaaccaaagaaaaacacatttcctatttaaaatgtcaaactgatcattgttccttatttttctcttggctatagagtgacatttccatgaacactcatttctggtttagcagtacagaaaaacacaatagctattaccaattatttagttcctactgagctgtacaaaaaggacttgtgaaagcaaagtcatcaattgatatttcttcccttcttctcctgcctgctctattgaaagaaaacatagtctgagtcttggcatcaaattcatccgtcttcaggctcttgtctccaaaatgcagtttcaatcttcacctcctacatctcatacaaaaggaaattatttttctttagggttgtccactaatatgagaattcaaggtttaggctgtgaaagacaagggagagtgtctaggaatgagcttcctgaatattctgttcctgttaaagtttgtggaaattctttccttgaagataatgagaccagagaggcagctacagtggcgagttagttgcctgggtgtacctgtcagaaggtcagctgtccctccaaagatttgtagagtgtccagcatgatgcctggcccagtaagcactcaaggaatgataatcttccctttctcacctgagggatgaataacgaaatacatggaactcagtgctctgtgtatgttgaagctactaaaaagtaggattcatgaaggtaggttctaaatattcctgttctttgcaggcttggcattgcctaacagtgtgtaactaatattactgcttagaaatattttatgaattaaggagtgaattagtttctttgacaaggcatatctcacaggggaaattgtgtggtttaccaacgtgtgatgtagagaatatggagagtggttttccttatttttttaaacacaatctctcataaatctccccatatctggttagaacataaaaaatagtcaaattgtagatcaatttagggaccaggtgactgagaacaaacacagtggaacagagatcatttctctcatgtgatctctgaggatcctcatgtctattattcgaggaaattcactgtctcaacagtcgttcaacttcccattattgtataagtgggaagtcaattccacctcaagaaagaacaagaatgaaacaagaacctaatgaaaaatgcaattacatacaaagcaccaggttctgcaaagtaatagtcaacttccttatcgtttctggagtatctgctattaaaaagtcattccccagaatttatgccatccattaccgactagaatatagtcttacagagagattagagtactataccttggttgacgagtaatagatcatcaagttcccatgtcatcatttgttccaggtctcctacggttgtatctactcagttccttgtttaagccagttttatgtgttcagcaaaattatgaggaaactaggcacaattatttagtggtacttgggatgcagtcatttctctagtacatttttaaatatgacattgaataaataaatcctgtggtatctgatttgcaacatttctgcttggctccacccagcagttgacccatctaagcttcacagtgtcaatccagtactttgatgatgatgatggtgatgatgataatgaaaaacaacatttactgagcacttattatgaggctgaaacttatctagatgctttaaatatcctaatcgtttttatcttcacagccatcctataggtttgagcattgctttcttatgcagatgaagaaactgagtctcaaagatgtaaagtcacttgcttgaggacaccccactaggaaatggaaattcaaatgcagacattcagatacaggagtccacactcctaaccattgcactatatgctcttcattctcatgctcttatttcctgctagacccagtacacttcagagaaccacagacacttgtatgaagtagtgtctgcttaagtcctatcccacctctatccagttgctcctagtactatctttcaaccttgaagatctgtatcagtgaagtccccggaagccctgtttcatcatggcatagaagatatatgaagggggagattctttaggaaagagccaaagcacccctcccagtgccaggaataactcagtaagtcagtgtaaactatgctgcagatataaagagagaatgatatttggttgcaatctatttcatctccctcccaacctcctccccagggagctcagctacttaaaacaaattttccattaccttccaaactattgctatgtgatgcagacatggccagtattgtcatctataattcacagagcactttatgtggttaagtgtcttgtgcagagtcaaatggcatgccagttggcaaatcctttggatcaattctgtcccttttgaatcactgtgatttgtagacacgcaggaaatgttcaatgcattctaaaaggcataggcttaacaacatgccacatgttattccacctcaatttggcgtggggttgactgctgcctttaccttcttgtataatggggttaaacttgtctctacgttctaggaatggttcaaaatcttcctactgttcgcagtttcatgttaaagatggatgatgtaaatttacagtcataatcagcttgaatgacttaacattattcattcaacacatatttatttaatatctacagtgtgccagtcactgtgctggggaaagcagtggataaacagcggagtctcctgttcctatggagcttaaattatagtgtggggagaaaaagggatgatgggcgggggggggaccacttcagtaaacaatatggtttaatataggataagtggtattaaaaaaaaaaactagtggtagatatctctgtggacaaggagggggaggtgcatttagatagataagttcgagacgacttttccaagaaggtgatgtttcaggtgagatagacatgcaaaaatctggtgaaagaatattctagatagagggaagagcaagtgcaaaggctctgaggcaggagtgagcatgtcatgctcttgtggagatgcaagaagctactgtgacttgggacggggtgagtgaagaggatggagagtagaattaaaatagatttgagggggctggccccgtggccaagtgggtaagttcgtatgctctgctttgttggcctggtggcccagggtttcactgtttgggatcctgggtgcagacatggcaccgctcattaggacatgctgaggcggcgtccgacatgccacaactagtaggacccacaactaaaatatgcaactatgcactggggggatttggggagaaaaagcagaaaaaataaaaaatatgagagaggtaggtatgtgccagatcacatggagctttgcaggtcaggggttgtttacttatttatgtgtttgtttgtttatttattcacttctttgtaagtagtgtgagaagttcccaaggatgtttaacgacgacagtgatgttctctaattcgggtttttgaaagactcttatggctgttgtggtgagatagggtaggaaagagcaacaatgaaagcagagaaaccaatctgtaggtatttgcattgagccagatgaaatctgaggatatgttaaccacagtataataggtaagcctacagaagatcagcaaaagtatgttgagtgactcatctgtgccaagtgttcaggtgccccccttgtcacgctgtcctctgggttggtgcacacatacttgcatacatcctttttccgaaagactcctccaccctcttctttgccttactgttcctactcagccttcaacctagatagtagtttcttcagggaaccttctctgaccctcaaattaagattagctaccccacagcaccctgaattctccttatcataaaacttattgtctctctttttgtatctttgcttaactttggtccacactagattaaactcctttaagaaagcttgacagctctatcactctattggttggctctggctgcagtaacaggatactatagactgggtggtttaaacaacagaagtttgttttataccgttttggaggctggatgtctgagatcaaggtgtcggcaggcttggtttctcctgaggcatctctccttggcctgcagatggtagcctcctcactgtatcctcacggagtctttcccttgtcacacacacatccctggtgtctctttttgtgttcaaatttcctcttcttgaaaggacatcagtcacattggattagagcctacccatgtgaacttatttcaccttaattacctctttaaaggtcctatctccaaatacagtcacatcctgaggactgggagttaggatttcaatatatgagttttgcaggggacacaattcagcccatcgtagttgctgttgtatatacagtatctggaacattgtaaacattcaataaatatgtgctaatgaactttatcttattttataatcttaataataattatatcaaagactatatggtgatatctcatttacaactccaggtattttgattcctggatgatccagagtttgagctgtaggtttagcttgcttttcaataagtaaaacaattaaatggcaataggcttctttattaccaagattcaaagatgactacaggtgaggatgttactaaatcttgaaatcttccattaatgccccagttttagagcaggattctaaagtttgagcattgatgtgagtttttagataatggattgaaccacatactctcataattaaagttacaccctgagaatgcatgcattaactctactagatacttagtacttttaatttttactttggattttttgaattcactcatatgaccttcttccatcattatactgatcctttgaagctgtcaatacaagctataattatcctcaattttcagttgagtgatctctttcaaacataaacctggtcacatcactgccctgcttaaaacttatctgtgtttcccattgctcttagaatgaaagccataatcctcaccatagtctatgatgccctgaatgctcccgtttaccttggtgggttcttggcccaccatcctctctcctcccatgagctctggccttagcagacttttctctgtcctttgatcattccaagtgttacagactttagcatatgctgttatccatgacggaaaatctgtccttctatcttttctcatctatactcatctaagattatgcagcatttccttaggacaactttttgagatgtctccccagccctgaaactggtagatatgttccatttggtctaggtggccttagcttctgtttattcccctggcttcttcatagcattttgatactttcaattatatgcttaaagatgcatgtgtttgactaatgtatacctccatgctaggctgtcagcaccatgtgggagttaccaggtctctttttggtcactgctgtatctccagggcttatctatttaacacttagttggtgctcaatgaattgcgttactagaaaatgaagctggcagtcatggaaacattaatttactcattagtaattcccaagcagtgagaagattgaaactccaagctcctaattccattgcaccctctgatatggttataaatagatatctttgggagaataggaagcccaagttggattttaaaactaagaataaatcagccacagtgaattccaattttaactcactttcactaatcctcaactcagtgggagagctctagtacacacgacatatgattttccccaaagttcacattttacctctttatcttgggagaaaaaaagagaagattaatagaattaaaattctcagtctcagtgatttcagtgacaatactcaacataacttaaaaagattttagtgagaataatgctaattttttttctgtgtacgtgaatcaccccaaaatgccaagtactttaaaaaactaagtcaaaatgctacttggagcatggattcatatgaatgataagtctagccccaaaatagtatgtgtcattgctaatcattacaaatctgctatctgcatgcagtgctgtgaaaactattcattttgtgcaactttcttcctggagagatacagagatcctgaaaaaggaaagtaaaagcttcaagcttaattgggtgaagcgaaaaggcagagaattattgttcaaagctgagttttcaataaatacagtgggataactgaaagaaatgacatcttgtgccttttctcaagctgatgtttagttattaatgtaggttcagaacacctcttagctgtttacttaaacccattgccaaagctatagtcactgacaatgtaatctcacccacggctgcctttttactagcagtaaacaagggctatgacccctcagatttaaaaatcaaaaaagcaaacacacttgggcgtacatcctaggattaacagggcttttgcgaagcttgtgaagtgcttccttctgtgttgtgaaaatccgtgggctgtctctcaagtcaatcaatgtatctgtgtcgatgacatggatggaaatatagtatacatgtgagtagtggggaaaggtactgaattccagaagaaaatgagttttggcaattatgcatgaattaaatagatctgttcaatgtggtatacagtaagtaatcatacctaaaaatgtgaatattgattcaacttgaaaatgtctaactttcttcactcacatgcacttggttagagtaaggtttaagatgttctatctttctcagtatttcaatgattcattactggaggccaatctatcaaccatcaaaaattcctcaaattaaggggctggccctgtgatgtagcagtgaggtctggcatgttctgcttcagtggcccaggtttgtgagttcagttcccaggcacaaacatatactgcttgtcgagccatgctgtgatggcaacccacatacaaaatagaggcagactgggagtcctgcctggtggcatagtggttaagttcccacactctgctttggcggcccgtgggtcgcaggttcacatcccagtcacagacctaccaccactcctcagaccatgctgtggtagcatcccacataaaatagaggaaggctggcaacagatgttagctcagggccaatcttcctcattaaaaaaaaaaaagaaaaaatacaggaagactggcacagattttagctcagggctaatcttcctcaagcaaaaaaaaagaagattgacaacagatgttaactcagagtgaatcttcctcaccaaaaaccaaaaattccttgcattaaaagtaatctatactttttgttggaactagaagcaatatatagcatctttcaatttctctttctctcatacgcacacacacacacactctctctctctttctcaccctaagagtgaaggccagatgaactgtattttttcccagttgttttggccatctccacttaagaatccaatcaaagaagttaaaacattaagaaaatttcatattggtcaaacagaatagaatctagcaatactcacatagtattatctaaggaagttattcaacaactacgtatgaagcatctcctgtgcaccagacaaggagatagaagaatcacatgatatggtaggatgagcttaggttttagagtctggcagttttacaacatagattttaccttttcctagttccataatagtgggaaaattaggccctcaattttctcatctgtaaaatgggaataaaagcaatattgatcaccagtagcaactgtaataggaaaaggttatgtgtgtaagcaaatcgtcctgtgcttaatcatagatgatccctctattagaaaattttcattttctcttcttagatactaggatgccatgaagacccagtcccttaggtcaagtagttctataggtagagggtgaggggaagcagaaacacataatgacaacatgaaatacaggtacagcaatgaacgtatttacaaaatgtccacagagaaaggccaagcatacgtctttctgactgggatatgcaggaagaatcaaggtcagcaagtgataaaagaaccgttccttgaaagatgaaggagttaaataaagaaatatgtgccatctatagtctacaaagccattgctaaggtgctacaaaagcataaagatggttcatacgttactgatacaatcataaattgctataaccacttgagaaagtaatatggaagaatttagtaaagttgaaaaattgtgtgattcagtgtctaaaaagcagaatttcatttataggaatttaccctaaagaaactttcccactagaagtaaaaggaggttcagcacagcgttggttgaaagcgttgagtgagaggccatgtcctggaggactctgaataggttagtggcacagtatgacttatgttttgaaaagatcattctgcttgctgtgttgagaataaattccaggaatctccaaggagggggcatgtagaccagtcgggaggctgtttaagaatccagactagactatggtgccttggtccaaagtggtagcaccagaagtggtgagaagtagttggatttgggatgtattttgaagatagaaccaatgatattcaaattatagaaaattcataaatgagatactgctaagcagtcaaaacgaatgaactaggtcgataatctaaaaaattatagaatctcaaaaataatgttgaacacccaaataatattacaataatattctattctatgatagaatttatgtgaataaaaaccctcacagtactatatatgcatagatacttgtctatacaagtttaaatatggattgtaaggatgcacaataaactcatgagtgttcctacctagccgcagagtaggaagggggaggaaattggactagagtggaggaaaaaaatatgagctcgactgtatgttaggttttatttcttgaaagaaatatttgaaaaaaatggtaataaatatcatggagacagcaacgtagtgtgtctacagatagcttgccacattccttttctacattttaatttagacagaaataaaaaaagaatatagagataaataaggctaaatccctatcatcacttagaggttataaatacaaggcaatttgtcttaagggatgtctggaaactattttttaaatgctacgagggttgaaaacatggcctgatcaaatgtaatttgggagagaaaagggtggaaggtttcaggtggcttgtaaatatttggtaatatttcaacaggtaaaaatgaaaaagcgcaatttgtcggaacaaaaacgagagcacagactggaaaccacagtccaactcttagaaagaggcttgatttttcagcctatagaatttagatcctactgatgagccctctctacccacttcccaccctctgaaaagagagagctgattcccatcactgccactgtgagataaacttgtgtcgcaaattcaaaaaggaaaaattcaccattggagaatttttagtaaaggaatttattatggctttagatgctaacagatacttgaaaaaagacattaaaagtagatagcattaactatttgttacccaaggaataaaatatatgaaagtttgaactcttaagagattttcaaaaaacaaaaatgaactaaaggaatattcaattcgaatattccactacgttcaatctaaaagaattactgatagagagattgacttctaaatctcaggctattaagtgtagcctgcgcggctcttcaggagcaagttgaaagtatgtgaaatacttggagtgagtgaatgtttgaacaagcctgttaaatcaggatgttgatgcaagtggcctcctgcccaagtagccagctctaccaccaccaccatcactctcaacacacacaaacacccatctcccagtgaaaaccaacggatcggccctgggtgctgctggcaagttcagcagtcaaactgaatgttaggaatatgaaataccacagtttagaagtctggtttatagaaattaactgacggtgtgcaactcacttctctctttcccgagtagcccaaccagaggagttgtaatgttttaagaggcatgaaaaacgactgtggtactcaagctttgtctcaattgctggatctttatttccatgtggcattaatttatcacttccttttgtgtgtgcttaatattctgacaaattgcctgataaacttgaatgctgacagtcagcaatgaggcagagtgaggtaccaatattgtgcaacaatgtgactgtgacacctataacatcagacttaagttttcagttttttctccctcagctgatcgtttttacaaaatgatctgatacaaatattttactttctctcagtaaattacccatatatttattatctagttatttaaaccttgttgatgatcaatggccaagtgagctaggaagcaggagtatcttttattattctttttagtaatcgtctctatacggccatcaacattatttgtcacagctggacttggtctataaatagctctgtgaaatgatggacagttttcaaggcttgttggcatggaatcaatacgtggcagaagggaccatatgaatcaattacatcgtccctagcagggttaccatggaagccctagctcctcataccaccttccttttcctgtccgggtagtattctctgcatgtctttaattagaatggacgcagttcagttagtaatggaaagcttccttgagtgagttctgtgaaggtgtcagacagaatccaaccagccatgcatattcagagaagactaatgtgaaaatgcaaatgcttcctctaatttaattccttacttgggggagaaaaaaaaaagggccctcctatcttggaagtaagcttcctttgattataaagaaattatgtttgatgtttcatctttactcagacacaaaacaagcagtagttcttaaaataacctcttacgtggatataataatctgctctatgcatttattcagttactctccagcatttctcagtgttaactagcctgcaacagcttcatgtcagacacaatccacagagtcaaacaggaataaatactgaattcctactatgtgcctggccctgtggggagagaaagacacataccttgttctcaaggccccaacaaatgagttggggagacagacagacaaacaggcacatttaacacaaaaatgagcttcatgtgcaggtctgcagggagcgctttcactaaacagaggaagagccagaaactgggcaagacgggagctggcgggggtggagacattcaggacacactttcctgaggagggtgtgcttgcttgagataaatttttaattttgaaggataggcaataactggctaccttgatggtgggggggaggacaaatggccagaaggaaaaatatatgaaaaagacaaggaatactaaaagaccaggctgtgtttgagaaactgcaaacaggctgtgaggactggagaaatgcttcatagggtttagcatcggaagctgggacccagatcatgaaagaatttgcatactgtcctgattctgcgtttcatttggaaggctcactaggaagcatttttactttaagaaagaataacatttttgcctgtgggaaagagtatactggtttcagcaaaattttgccagtggcaaatttttggtaaggttattactttgaactccttttaacctaaaagttttatttgaaacaaaggttttgaaagaaggaaaaaaattaagttgcttaataatctgggcagaaggcatatctgcatgttacttttagtgagaagacaaaagttttcctcagggcttaagatattcctgagtagaagctggaagccaaaggttttgagtgatttccaggagattagactccggtctaatgtgtttgcttgtttgtttgtgttggagtcccccctccctcagggggtgactgggacttggcaggtacctttttgaacattggacttcttcactcccccacactgtattgaaaaggctattaataattgtaattatttaatacacttgtaataaaatgtactacactggaccttgactctgcgtacatgtcccatgtcctctttcccaccatactgagaacatgtttgctccctcggtttacagatgaagaaactaaggctcagaaaacagaagtaaactacccaagatcaatagccaagctagccaagaagaagtgaacctggtatttgaaccccggctgtttttacttcaaagctcttatccttattgcactgtggagggactctgcttccacagacatccatggatgtcgtcgagaacacatgtaccaccctgaagactaggtgactcagagttggagagaatgtaaaagaaaacaacaaacataaaaagctatattctgtggtctttgtgactaatgtacctccagaaacttcttttgaatacttgagtaacccatttaccagctgttgggaaatttaaatctgcctgaagtttatgcacactccttaaattcacacactaagtgctttttgttttccattacctctgaattccatatcacttcttctgcgtatatggtgtttgaggttacttaaaaagtatatgagtgtaaaatgagctgttatttcttctgtcattagggcactgtgaaatcctgagataaacacgcttggggcaggggattttgtctcatctacaaaaggaaaacaaaattagccttgatggtgtaaataactccaagaaattatttccatggcagtgcccactagacatgaatagtgaacaagcctggggctctccgctcaagcccctcaccaggctgcgctctcctcccaggaagccacagccagtatatctaggggtgtcaaatgtctccttagtatccctgattttatataaattacgtttattatcctcctgtcaataataaaaagataaccttattttaaggtgaaaataaactgccatatcttttaaaacaatctattaaggtgtcatgcacatgccatacaattcactcatcattgcctttacttttttggaacttgtaataaagcttgcctatggctattcgtcatgctggtctacactagcaagcacccctaggtatttttaacatctgtgtaacaattctttccacgcattacttatgtaatcctcaaaataaccctgtaaggtatttgtattagtgtttcatttatattagtactggttttgtttttattctaaaaatgagaaaacaaaccttcttaaatgttacatgacttgcccagagtaacactggcccagagcctggccatgaagcttagtcttctggccttgtatctcttgatattctttttatgtcacatggataccaacatgacaatgtgcaataaggggaggggttccccaaagggaaacccaccttctgttaccaaaagaaaagagtcactgagaagaaccgaacaccagatgtccatcatacaaacctccgtatgtccccagattatttttattgtaagttgtattaaactggctactttttctatttctgttttctaaaatttcaccaaaaatattgttatatcacatctttgtagtttaaggatattttcatagacgtatttgccactaggaaacttgttcttcaatataatctgttcgatgagttgtattaaccaatccgttaagaccaattaatggataaattatatttaaattatattttatgcccaataatctggtaggcttgaattcacttaaattgatttctgtcgtcacagccataccaagtacattttcagcagttaagtttcctttttacccaggaacctgtcaatttgggaataaaatttgtcttgcaaacttgataacactgttgtattcacatggtaacatttgggatctccagtatttggagaacttactgcaaagactctgcctgataactgctatctaggtgtgcctatggtagcctcttaggatttttccattcatattccttgtagttcttcttgatccaaagatgcccatttcaggaatgtactagatcccattcagcatcctctttgatgaaagttcttaatgctgagagttaaatctcttatcacaaaaccaaatcagcatcttttcctacttctcattggaggtattagctgggtagccccagacagagtggaaccttgtgattatagtttaataacctacctgctgtgatctttattgcataaaagagaacagaatgataaccaactttgtttctcagagaaaagcaatatatatatatactgggtttctggtaaatgtaaaggctccttctgaagtaggctaaagtacaatactatgttcttctttctgaattcttcaacatgttgatgccagctgtcgcatttaaataactctcattacagagaaatgaccatcaatcaaacatttttttgaagcaatgaattttgttcctagctcagttgagttaataaaatatgaaaatttggcagccattgggagataagcattgtgtttatttaaaatgatgcttttttctcttttagttttaagagctactcataaatatccttccattttaagagctcagacttcctaattattaattttagagctattctgacctttgtattatctcaagggttagtctagatgaattctgttataagccttggccttttaaatgatgaatttggatattagagatcaatatttagatttatgtaatgtaatcagcctcctgaaatcatggtgctttcaatcatgtttccttctttacagtccataaacttgggccaatctcttatatcctcgctcacagctcccaagataccacatataataacagcgaacatttcatgagaatttactgtgtgccaggcacaaaggtaatactttatccatattatttaattttctttgtgagggaggtactagtaatatgccaattctttatagggagtgattagctaaagagaaattaggtaccatgcccaaggttacagagatagtatattgtggatcaggatctagtaaactgactaattccagagccttacaggtataattcctattttccagtcttaagaactcattatctactggtttcccatacaccaagttcactcatactccaggtcatcactattgttcatcttcttgcctagaatgttctctcctttaccctctcatgtattcaaatcccataaatgcatcaaagctcagcacaagtcccacctccctggtgaagctcattggaacatgtcatccctgtgcctaaaatcccttaaagactcccatttccaaagggacaaagtccaagaatttgagcctggcatggaagattcttcattatttggcccctacaaaactctaatcgaatatctggctgaactgccctatttggcttccctcactctccccaccaatacacatgcacacattttatgctccagccatgctcgtgaactggacccctgcgcctcccgctattcaaggattttgccctagaattctcctctttctgtcctacatcaccaggttttttctctatgttcaattggaaaagtttttcttaacctcacttcacttccatattttgttccttcctccaaagtcacctaaatacatagtcttcagtttatctcccctatctcactcttgagctctctctgatcggagttttgctcaaacaaatctcctggaaatgcttttgtcaaggtccctggtggcctgcatgttgctaaatccaatgacctcctgtctatgcctcagtcatgccttctaggaccttggaagatgctgtctcctctacctggcaaacttctcccctaaatattccaaatggctcgctcccaccctccattcagagttggattcttctttcatctgcttggttaagccttctctatctatttaaaatcagaaaattgccctgctctcaacatgttgtgacctcttgcctgcttcattatcctcagcagaacttagaacacaggttttacattttactgtatgtttttatattttactttataaaagacttcttattttacctgatggtgtgtgtttattttattttggatgcttcttttcaggagaacagacaaggtccatgtgggtagggatttcagtctatgtctcacagcccagtacctgcaatatcaaaaaaagcccctggcatattaatcgaccttcaataagcaatccttgattgaatactgaatcacccaaaggtccccaaatgtgccacaaggtttaatttcttttggtcatttttcttacggcttcctgtgtcctgaataccttttgctacctatctgctcaagaatgcctgaccaccctttcagacatagcttaaaactgccttgttcatttctcacattagaaataactcgagttaaagtctcagctcttattcaggtcatcatgagaattaaatgagatgcaagtaaggggaatcatggcttatctaagggcttcaatgcatcagaaaatttcagcaaattattattattattccacttcttactcttctacccctaaatccttatagaaataaccattccacatttatcacacttatgtcattgtccctactagaccactgggtctcctagaggccgagtatgtcttattcatctttatatcttcagatcatgactcagagcctgacagataaaagtctgaatgttaatattgatagtcatcattaattgagtttaattttgtactaggtacggtgcttagaagtctgcaaacatcatgtcatttaattctcataacatccccattcagtagtactttaaaaaaattttatactttaggacactcaatcaggttactttgtttcctcgagatcacacaattaatgagttataaaactggaactagaattgaggtctgcctaactctgaaatttttctcttcatcactttactacaaccggaaaggatgggtgggtgaatgaatggatgaagggacagacggatggaaggatgaatgaagactgttcttggccattccattccaactcttactctccttattctctcacctgtataatctgggacacatgcaggctgtgctacaatattgtagcaattaatcacacagaggctagaattattatatcaggttttttccttttctttttttcttttcaacttaaaactctaaggcaaagatcttagttaaattggtactatattgggctcctttctgctctaacgaacattgttgtctatttagggaaagtataggcagtataatatcataagtaaatgcacaggctctggaaccagactgcctgagtccacttagtcacacgactaacccggtgtaatcttgggtaaattatttaacctcagtgggcctcagttacttcaactgcagatgaagaaattatttgaattatatttggacttagtataaatggttgaattaatgcatgtaaattgtttagaacaggacctggcagttagtatgtgtctaatgtatttaaaagtattttttttgtgtgttttcataaggtatacttttcagtgaggaagattggccctgggctaacatctgttgccaatctttctctttttttccctccgcaaagccccagcacttagttgtatatcctagtcacaagccattccagatcctctatataggatgccacctcagcatagcttgatgacccgtgggcaagtcagtgcccaggatccgaaccagtgaaccctgagctgccgaagcggagcacgcgaacttaaccagtgagccacagggccgacccctctaatatattttagctatttttcctttggatatgtttcttttatgcacatgtattagacattctttacttaatcacaagtgatcttggatgtcactaggagaataggcttaaaccacaaatttgaactttattcttatgtaaaattcagtcaataccattgtcattatagctaacccaaggttttctttagtgaaagcttcttaaattctaggtactccaacaagactctcttatacattagttacatccatgacacgaatcttagcagtgtcacttccctgatcaaagtgcaccttacatactctcatactgacagtgatggaatctggattccaactcacatctttctgaatctaaatctggccttctttctacaacccagggctgaccagtttgaaatggcattttcatcttagcctagcaggaaatgttgaaagttaaaaatatatatgctttatttcagaatctctgcctgctacaaacaatagctcaaaagctgcttgtatagggagcctttggggaatcgcttgcatttttgctatctcggatcaaatgcagcagacatggaaagatgtcagactgtgaatgctcccagtggactctgtgtttacaagctagtaacagctttgactttgcatatgtagacttaaaaattccctgacaggcaaaatgtagctatgtgtcttcttttaataggaattgctacacaggtgcgtttccactacagcgaactccccatggagccatggatttccatcatgtgcctggtttttgacacagcttcactgctttagagaaatgctcatcaaaacctttttgagatggtgaatattctccaagctgtaaaatccttcttaatataaaatgtctgactttgccaagaatgagtatcctaacccagtcttggttttgatcaccattatcttttgagctctttaaaggcaatacatatgttcaattttgtggggtctttagcatgcagaagagtgcttggctgagaccttgataatgagaataacgcaaaaataagtaaataaacaagtaaagtcatcaaaataaaacaatacacgataggatagggtaggtacagaaggtccacgcaggacaaaacaggtacaagaggccaagtgatgaatctactttcccagtccactttagggtaacttggccaaaggtaagaagccatattttttgtttgtttgaggcatgattgagatacgatacattggaactagaacttgctctctgtttttttgttttttccctccgtaaagaccagggaccatagagtcgggattgactattattttttcgtcctcatcactagccttaaggcttagaggtattagagggcaaaaggggggattctcctcagtcttgggatgaaagctgtctctcgcagctcaagggctagcttgtgtaacacacccctcatcactctcttgtgctagccagcataagtacctgttgccctctcctccctagtactctgcctattcaaccctggcagtgcccctccaggcaccaaaactagaatcttgagctctcaaacctcaagagtttccttcttgttttccctctggctttgcattttcttctgatgaaaagcctacaagggagatttccgtatgtggaagacacgattgctggaatggctgaagatttggaaggattcgtgataactacattgaaatgcagcatcccatgtggattgtgggctggagtgccttaacgtgtttaaaataaggtagctccttgtctgctaaaccaaccagctaatagttactacctttttgtcacccctgagatagctgctgagcttaacatattcaccaatagcattcgagccttgaatatttgagtatgcattgtatcaagagaaatagtgactgaatttaaagataagtatggaaaatgcaattcctaggcttcaaagctaatgctaatataaaaagactgtgtatttatgatataatattcaagcaaccgttatgaacataaacatgattagatattttacaccagacaatcatctatttatagtctaggcttagccagagtgggcacatgagaaaaatgatagcataataatctgcataaaaattaacatttgtaatttcagatatttcagaatgtgaatattctctagtttggtagatagatataagctggttaaaactgaggtatgaatgtttccttaatggacacaaatatgtcatccagatcttaggcttcaaattactgctaatctgaataatttctattctgaaggtgctcactggcaaacttaatagcaacaacagaaacagaataaatagctattgagtgagaaaaaatagaataagaaacaaattgcagatagtttcaaataggtcacacctaactatgatagagaaaatacaaccatctcaggtatggtaaagatttgatttttttcaacataatctggaaaataaagatagtatttaatggcatcttttaactttagagataatcatgctcgtctttggccgaaaacactttaacgtctccttcttgtccaccacaaagtccaaatgcttaggagaaaactcctctctcctttggtacaaacctgtctttccaactttctcttccttcctggcactccctcctgccaaattgagtggatcccataatttcccaccttcttacctttgttctcctattttacatccacttgcaatgtcctttcctgacttttgtgccttcgcaaaggccctccaccctgcagagtccaactcatgtactttttcttccaaattggatgccctgatcaacagcactcttcatactatgaaatcatcccaccttttatttatatgcttctcattgttcttatctcctggtatctttttttgcagttaatttgttttgtgtctcctcatgatctacttgtttatatggttttcaagattctctctagctttctctgatatctaccctcctcataacatagatgtattgcttgtcattcacatattaattcattcctactatataaaatgcatgttatattgtaaaaatttagttcatactaaggtactatcttaattaagatctttccatctacaacctgtggattacatgctgtttcatccaacacatattattgatatctcctatgtatgagtactccgcccaaatctcttttctcagagcaatttctacacaccactgttacagctcttatcacattatataatagtattctgccttccataacttcctaatattttcctcttggcagaaaccatatcattcagttttaaactcccagcacccaacactttataggctcttggtaaatgtctgctcaataaacatatacggctggatgcattgattggtgtgagaatgaatgcataaatgaatttaggaatttttttttaagtagcatgattgctgtcagcatgtgtttggaggtaaaaactccaattgaggatgtaatacttataataatgttacttaaattaagtgttaacaatgataattgtaaaagaaggatcattaaaatgtagagatctaatagggttcacattttcttcatctaaagatgagtaactcctgccctacaagcttagactcacttcatctttccagccaccacaaacaaagacactcatattttatagtgtatctagcctctggtctcaaaatggtagccaacaggggaactctttctgagccctgagtatttactttctgatttaggaaattagtgtaccagcatttagggcctctctggctagatccttacagttccccaagtgctgtggaaaagaaatggaggtaattcctaagtacattcttcaaatcccaaagaagacattttccctcagcctcagggagggtaggggctacctcaagctttggtctctctttgtgctcctgctgttcattctgatagtgatgatagtcaaaaccatcatctctgaagtgcaaagaccaggaagcgcatatcacaaaatcagtaatgatattttacagcacagcttgcaaccaagaatttgaaaagttcaattttctcatttcccaaagagctacataacttgtaagcatactgcagatttttattttgcagatgaaaaatgtaggcacctggtgatttccctaatgccagcgccgttggtgacagaagcaggggggcagacactcctggtgcactgtgtaatgcagatgcatctacgctgaaaggtcaggccccacaggactagggcaaggtttgagaaacatcttttacccaacaattgtggggacttggggccagagagaaagcctgcaataatgttcaagacaggggctcagagcttgaatttgaaaatcatatccaaccgggtaattggatcaaggacgactgcagggatgtgacagtcatcaaagtacaatgcccaaagatcagagggactggcaagatgaggacgagatgagagaatgtgaaattaaatagaaaagcatctaaatcatgacttcactcagtagctactctgtggtcttgagcaggttttcaccagctactatgtcatgttgagcaatttccttaacctctctgagcctgttttctcttctgcaggaaggagacaaaaaagagaacctgtctcaaaaagagtgactatgaagattcagtgagatttcatttataaagtgtttagcccattagctcaataaatattagctgctattatgtcatcatcaattataataaaataggtgagttggggatttggctgaataacagatacaacaatcacaaattctttcttatactttcttctgtcttttatttgtttcctgtgatgtgttcgatggatggggggacgcaaataaagagctggatcagagcaaactggtctacagtttttttcttcaatttcactgtaaaagagggaaaaaaatactttttccttctctacccatcttagttttgttagctggagtcctgtaaatcagactgacaaaatacggattaacaagaaaaagagaaacagaagtttaacattcacattgtgcatacacgtggaaatactcagaggtgagtaattcaaagaggtaattagaatttgggcttatataacattttaacaaaacaacaataattttataaagaaatgacaagactaaggaaaagaactttgagctcttagggatggcaaagtgccaggaggtaaatataaggggagactaagggtggatgaagtctggttttagcaaggtttgttctgtcgatttctctggttagtgtctggctgataagggtatagcattgtctccagggattaacttctgtctttcctggtagagcatgggagatggggacacctttacaaatttatgttctgctttctggcaaggggcaggggccagaaagctttcttatatctacttcttctcagttgccttcagctcaaaataattcttatgccaaagtggcatatcttggggtagcgtattttgctacccttcacacctatcagtaaacggatccatgagaacatttcttcctgtccacgtgcagtggggacatctgcattgcttccacagagggacctggttagctaccaagttttgctcctgaggcattgtgatcacttttgctgaggagggagtggaggctgtagatgagaataagggctgaatgtgtattactttcggttgagaattttttacctcgtctttatctcaaccctaagaagtaggtattaataatcttattttccagatcataaacctgaggctaagatataaagtaatctacccaagatcacttagctaggaactggcagatccacaattcaaataacgtgcattagactccaaagcccatgctgcttctaatcccactagtttcgcaaaagtaatgatttttggtggttctttcttcttgccttcaattcttatcaatagtagttgccaaaagtgcaagttctgggtcaggagaggaggtctattactttgtcgaccatgaggtccatctccacgtggagccagccccttagctattgtgtgggctccctctttcattacgtggcacctcatctgcataatttcctgataactgatacagttccattacaaagttgtttataaactggaattcacaacatttcaggttgaatttgaggtgttctatttccatctctagaaaaacacgagttgaatgtacagcctatttcctctgaattgtgcatattataatcccataccccagcttggctctcttcctctttactcctcctgtgcgtattgtcttctttacctcaacaaatatcttattcatgggctatttaggcaagcatccttcttgggctttgctttgtgaggttattccctggggagggaagagaagaaagagggagggaagagaattgtgaagagaagggagaatttgaggctcacaacttccttcactcctggaaggaaagtataaaataatactaattttagttataaatatgaactctttatagctataatgagtgcaatacagaatatgtatccatattattacatatgttagtttataagatttatatgattacaatactcagttttcatgtagttcattctttaatccttttgtgattcttgaaccatgattcaattgccaatttaaaaaaaggaaagaaaagaaaaaaagaactatgagagacctcaaggtttgaaatcatgaccagtgtacttagatctttaaaagttctaaagtgaaaagtaaactttagcaacaattgcaactcaaatccttttagaagccagatcataaaaacagttaacattttttgagtattaactgtgccagataatgtccttctctaggtaaagtctactggagcaggagttgtaaatggaaatttcaaggagcagataacagcaatggctaacatttcttgagcactttttacgtgccagataatgttaaaggcacttttaaggagtattgcatttagtcctcactacatgaaattgaagccaggtctattatactgagtttatagataaagaaactgaaacactgaaaagtaagtcaaatagctaataaatgctggatggaggttgcaaactaaggcatctgacgcaagagtctttgtcctcagtgccgaactttatttccttctaactgtccaaagtatccagaagtaagacagtaataagtaatttaggaagtggaaactggggagcacatatctgcgtaaagcgtgtaaatacaatgatgatggtgatgatgaggatgaatgtgctggccaaaaaaacatatttcagggccagttttcacttctaggctgccagggtccagaagtagatgctgatttcaagctaaattaaatggaattatggacctgaaatgtgaaaatgattctagggaatgttgatacttggcccctgacttgagggaatttgaggataattgttctcttgtctaaacctgaccttatagacagagactaatcatttcaatccaaaaattctgacccatttttagactgcttcacctgtatgtatgtgattaacaacatttttctgaacatatattttaacatataaaagaaactgtggtacactatgaggaatttttagaaacaaaatattctctttccattaaaggctgttatggaaaagcacaataaagtacatggagaagcttcattgttagtttaaagaaatccattcatttatgttgtattctcatacttttgaaagataatgacgcattggctaggaatacttcctggacaaaaaaaacaaaaagaatccaattaaacataagaagggtttcttcacagcatgtcaattcttcaaaaagaaggcatcaagaaaccaaaaatcaaaagcaacatgtccttttaaagctctgaatgagtttgacttgaatagataagcaagcctcttcatgttctttttgggaactaggttagatataaataaaatttattaggaaattgttttaattttgcaatgtacacacaaatagaatgtaatagtttatcaaaatcatttttcttgctcatttttcttgctacaaaatcattgtagccaatgactcataatgatttttgattattttgattcacatttttctagcagattgaaataaatgtaaggttgtgtccatcaatcagtaagatattagaaatctttaaatttgaaattctgaaaaaaaaaggtttaaattttgagacaggggttacccatagaagggctcaataaatatttttgaatgaagggatggatgacagaatgagtgagtgaatgagtagaactataatgcaaactatttgcaaattcttgttgctacatacaatctccttttcaaacttaaatctcatttcttttaatttcttgataactcactgttggtgacccgtagtagaatgaccaattttccaaattttatctcttcatctaatgtaaattgcaataaacatggaatagaaaggatttgtccctctgacttcttcaggctgctctccaggaaaagtttggacctcaggatcaatttaattcccaataacactgtttcataatgtggctgtaactgtgtcatgagctgaagaagtggctaaaagtcacaacaagaaactcacatcaagggaaatagtcattgcaggcattttaaaggtcaatctccttcaagacaatggaaacactttaaatggtcttggatgtttacagtgttattttatatgctttcctaatgcatttttaatatctgaagagagaaccagggcatagtgtttacagagggataattatcctctaaagtttataaataccgctatcctttctgaccttcatttagttcattgtgtctatagcgattaagaagaatgtcatctgctcatccccaaaaaacaggataaaaaatgcttttcaaactcagccttaaacataaaactctttgtattagtttgctggtgctgctataacaacgtactacaaactaggtggcttaaaagataggaatttcttgtctcacgtttctggaggctggaagtctgaaatcaagatgttgtcagggttggctcctcctggggactgggagggaagatctgttcactacctctcagctagcttatggtggtttgttggcaatctttggcattccttggcttgtagaagcatcaccccaatttcttcctttatctttacatcatgttctccctgtgtgtgtgtctctgtgtccagatttcccctttttataaggacaccagtcatactggattagagctcactctaatgacctcattttaacttgattgcttctgcaaagatctgatctcgaaataaggtcacatctgaggtgccagaggttagggctccaatataacattttttggaaagaggtaattcaactcattacactcttaagagggaaatatatcaggatattacaaaaagaacagtggcacccatatgtcaggcacttacatattatcttattcaatactttgacaacctagtgaggtagatgtcatctccatttcaacaaatgaggaatgtggagtttagagagatcacatagttagggcaagaacacacaccagtgaatagtgggaccaacagtcaaatccaggccaaaaatctatacaatttcactccactctgcctttgaagaatgtagcccacatgggcagggcttttaattattcactattatatctctagtacctaaaatagtgcctggcacagaatacacatgcaaataaatatttgttcaacaaataaacaagaaaaattagctgacttattcaagtggttttcctcattgtgacatggaaggaaagcatgtgtattgactcttggacattaatggaaagctgtctagtgtgtggccttcccacaaaatgaaaaatgtcattatgcagcatcatcagtcagttgatatgtggagggttttttaaattttctacaagattttcaatcactagctcctatcaaagaagatgtataccatacactatattttaaaatacacgcacatatacacacacacgcaacatttacgatagaaatatggccctcaccagatatgtggtccccacgtgctacaaaaatctagccagaaagagcgtgacttcagtgtctaggctatttcagagctcttttacaccacatgcaagaatattacctgaaggtagagaaccaatgttaaaatgcttgctcttgattttacctggaataatttccctatcaagtgatgagtggactggaaaaaatgcaaaacaaggtcaggctcaccttgaagagggtagaactgctgtgaatacgaaaaaaataagacattttctagtctgagctccattttgatgttattaaaattaaaatatattaatcacattgaaaaacccaagtcaataccttttagggaaatttaaagagaaatcattaaataaaagaactgttgatgatatgagggttatgcatatgtctgtagaaatgcttcacaacagtaataatgaagttaagaatgaatgaatgaaaatgtgggcataggagttccttttcttgatgatcccaggagggatcatgtctaacgttccttttgctcctgcactttattcagatacatagttacttgaatgacttccctataagaagcttccctttaagaaaataataatacctcacagtaaggaccactttgcagtttacatatcattgtcctgatcttgtttgatgtacaaagtaattctctgagtgaagcaggccaagtattacccaatagtactcatgaatcaatgaggctcggagcgtttatttgattaagcacaactaagtatgtgcttaatgaacaagtgtcagagacaggacctgaaccagtcttaattgtgcttagggattgttctttcagctgctgttgggcaattgaacaaaggataaaaaaaaaatccatgctctgcggcagacgggtagggctattgcagggcagagctttaagcaatccagcaactcttcaaccaagcaacctcaagacccatcacttttacacagagctgcatcttatggagaaattaggtgcaaggccaatatttaaatgataatcactaaagttattatattagttttctagggctgacataaaatatcacagactgagtggcttaaacactttattttatcacagttctggaggctagaagttcaagatcaaggtgtctgcaggtttggtttcttctgagacctctctccttgccttgcagatgatggccttcttgatgtgtcttcacgtggtctttcctctgcatgcacatatctgtgtcctaatctcttcttctaaggacatcagtcatattggattagggcccacccataggactgcacttaataaaggtaaaatgacctttttaaaggccctgtctccaaatgtggtcacattctaaggtaccgtaagttaggatttcaacatgtgaattagggggaattaaatgctgcccataacagttaggatgacactacattttgatttgccaggacagtcttcatttatgcctgttgtctcggtataattatcattaatttcctgtcttactcaaaagctttccaatgtgtatgataaattatatagttattttacctatacagatggttcccaacttatgatggtttgacttagaatttttcaactttatgatggtgcaaaactgatatacatcagtagaaaccatactgtagtcaaagtaatttttgaaaatcctttaaaatcacgcataaagcatagtgcagatgtactatttctcagtaagtccactacagctagatttttctcccattataatatatcactgtttcttcattggggtcaacatgattggggtcatgttgtatgaaagtgaatattgctgaacactagacatatattcaatatggcaatatacctttcactcttaaaggcatgtgagaactgaagcctacacagaaagagcaaattcacttctcccatgttatatacatttaggggtgagcgttaactcagtatgatgatgggtagtgttgcctgagcaggagagtttggaaatcctcatctcacacaagaagggagttcaatcccttcatccggggaaaataacagaccaaggttgtcctgcaggccagtggggatgccccacctccttctgtgggttagagctttcttgtctgtgctagttctaataatcagttctatgactctgaacttccctggcactaaaattaagttacattcaacattcatatttgtagtgttcaaggaaggcagagttcaaaagtctgttccattacatgcacttttaccaaaaaacaaccacctgggagcatgaggcaacaaagtctggaaggaatggcatgtggataagtgggaagaaatggcagaggatgacccaggtagtgtgtgacatacaattcttaattaaaatgttagtgaggacctgctgtgtccatatcagttttctgaggtttcccaaataattttttgctaatggtaaagtaccaaaatgtataaataattttactaaataaattagagtagttattcctctaattacagtatactttcattttgataaatgtttttgagagcgagagaaggaggtggtattataggcagctggctggggattgcacataaccttggtatacccatgggagtgtttcctagactagaaactctttcattatgtaaatcagtacagaaacataaggttgagaactgctgctctagctctttagatcaaagttaatgtccctgaaaattctgtcccttgtgcttgcttcccccatactttatgaccctggagagctgatagaaatatttcctgtgatatcaactacttgtcattgcaatctgttgcccctcaccccaacccccattttgagtcaggggagcactctgggtaacctatcccttcaccatctgtccttaagaacccagaagtcttcagggctctggtggctggccatgttagcagtccatacattccatgaggtgtagtcactgatgagggtctcaattccttgcaagggtccccagatttattgctgagtaattaattgccttttctggtgccaagagattcctcatctcagttttctctgtgacttcattaaaggtttataaaagaagttgatgaatgacacattgcatgcactctactactagattagtctttaaaaatagccctcgttgtgcccctgcccaaccccagtacttccaatgacaccattatttcagcctgagaacgtttggaccttgatctaccatcaaagcacttcactttctgactcagtatactcctctgccttccatacagcaggcattcagtaaatatctattagaggaataaatgcactctgtccttcagtgataaaataatagtagctaaatattgactggatgcttatgatacgttaggcaatttctctgtttctttgatacttgcaataaccccgtgagtcaggtactagtattcctattttgcacttgagaaaacaggttaagtgacttggccaacattatttattaaattactaagggtcaaagcccaggttctaacttgatcagactagctgtggagtccaggctctggacagtcttgtacttactctcccggtgctcagccaactcctctattcccaccacaatgcctttgttgaagcccttctcccatcaggaagcacccttcccattcattccacctagccagctccaaccagcctatcaaaacccaactttatccccactctaccatagaaacatctcaaatcctccaactcgcagctaactctctttccccggaactcacagcactcattttctgcaccaattcttttggctgccagcatatgccagatggtaaagtctttagaagtgttgctttgtattattttttaactcaataaatgtgtaatgaataaataaaatataacaatgcagctctaaagtatcccaggactatgtattttggctccttgtttacaagtatcttaatgctcttctccacacagttttgctgctcaaatagatctatgttcagatgacttggtttagggttggtctgagtcagctcaggcagtgacggtcgtttgcagggagaaactgttatgttcagtacgggctctgcttgctgactcccaaacaagatgaaccaggatggaaccgctagacagaatgctgctttttctatgctgcaagaacacaggccagaatataaatgggcttggttatgttttcttccacagaggagctatatgctagcactgattttttttttgcaacagaacctagcagagacatctgtgtctattttataagcttttgataacttaacttggggaagaagtctactgaggaaaactgttcttttcatcattgaagattgttagtgccttgataacaacataacttttcagttatggccacaacatccgtaaaggcatgcaggtctggtcctagtcaagagagaaaacaatcaaattaccagtcaatatcaacactctagagatccagataaggataacacacatgtacatgtgtacattccattgggtgacccgtaagtcacacacagttgactttcgtgggtggatgagagcacctttcctcttttgcccccttccttcttctttcttctcccctaagcctttctttttttctttcaaccccatgtaccatgtcttgagcacaatccaaaatatggtcttcaaaaggcctccgagttctagcgtcatacctgagttcacctcactgagaagttgtggattcctacagtgtgcatagtacaagactttaagcctttctgattctatcatgagattgaagcagatattttccacttaatacagataatttctcacagcataattttgatgtattattatattaataatattgtttctaatctccctaagactccacataacaacaggacaatgggtgacagaagagagagggatgaagagaaaatgtcttactacaaaagatggtgaagatgatggtgatgatgatgattaaaatcatgtgtcaagcccgtactaagggctttacatgtaacatgtctcgtttaatgacacaacccacacattttacagatgtgtgtttgaacattagatgagttttagagagtgtcagtgacttgctgcgcttgtcctttgccagtttgctctcagatccatttcctgttcttccttactttgatctaagtcacaaggaactacaattcaggttctcttgctgacagccttataggaaagttcagcctgtggaatgtaccagaggggattggaaggtgagagggagtagccagggtgtctccccacctcctacctcagcagtgtctctggcagtggcatctcctctgtggttccagctcgccctgaacagcccctcctcctgaggtgccagctgccatcaaactcctgtaacgttgcctccttcttttgtcctcctaaccatagaggggagatcgtggcttcctctatctaacagttgctattttctcaatagccctatcatccattgtttgacttctaagcatgaacattgcctgaataataaattccctatattaaatcgctttggtttagaatacccaaagtattttttcttttttctttattaagctctgtctaattcgtttgccccaggtcacacggctagaaattagaaagctagaattctaatccatgtgtacgtcacttcagatctatgttcctagccgctttatttacctcttggaacttaaacttaaaaataaataaaataatatttagttttacatctagaagtatgagttttactattaaacatcatcttgatttggtgaagtctgattgtagctaaaacccaaagccatgaggtgcagcgttgtcatcttttgcatcatggaaaattcacagttgctttcttaaattgtgtgggttaaagttttgctactcaaagtgttctgagttcagtaggatgaatatcacctggaaactttttataaaaatacagaaccccaggtctcatcacaatgtgtgtttgaacaagatccccatatgatttgtatacacaataaagtttcagaaacactgtactaaaagaatgtgatttgagtaaagaataaagcaaaagcctccttacaatttaaggcatagcaccattaaaaagttgtttgtaagtccaagtttttccaaatttaacagctgctatgtctcagtctttaccccagcttactaatgagttatgttcaaaattttatttgttaggaaaattttgaaattcatctcctcagaaagacagtgctatggatcatgattaagtttataggttagccaattagaacttaggttaaatcatgatatgatgaacatcaggttaatttcaaagtagaagaaaagtctcaagggctgaccgcatggcgtagtggttaagttcagcatgctccacctcagtggtctgggttcatgggtttggatctcaggcacagacctacaccactcatcagccatgctgtggcagcaacccacatataaagtggaggaatactagcacagatgttagctcagggctaatcttcctcaatgaaaaagaaaaagaaaagaaaaatttccttcctcttttcttggattccaaagcctgttctaggcattttgtttttacatacccagagttagactggcatcatgctactccacccagggtgcctttctcccacttcatcattcctttcccaagtatcagcccactgcatccctaaagttccccagaatgagctaataccatactgttttcatcaaagcctgcattgtccagcaccagtcattttagcaaggagttactatgaaagtaatgaactttaattcaaactgatgagtggataaccagtaatttaaacaccctcagaagtattttcatatttataatgggatagttgttagctcaactacatctctcatttgtggaatttcagctagtgtcataaatggaaggggaacaagtttaacaacgtggaggtgacatggggaggaggccagctttcctcggagcagaccctggagcccactgctgttcactatccctgatactcacagcttcttccctttagcagttctaactttgttgttgtcattcttttttctttttatagtggttccattggcatagggcaaaaattttctgtttgaatatgtagtttgcttacaatcagagttacctataacataaaaattgattgattccctactatattagttattcattactacataacaaattacccaaatttagttgttaaacaaaaccacgtttatcatctcacagatttgtacattgacaaggttgttctgactcaggatctcccatgaagttgcagtcaagctgttggctgagacaacagtcggttcaacatttgactgaggaaggatccactttccttctaagttgctggcaggcctcaattcctcaccacctggatctctccagaggctgcctaaatgtcttcccacatgatatctggcttccatctccctggggctgttgtatgacatggtagccagcttccttcagagtacaaattcaagagtgagagagtgtgcctgggatggaaactgcagtctctttataacctaatctcagaggtgacacctcattgcttctgcagtgttctactttttagcagcaatcactaagtccagcccacactcaatgggaaaaaaattaagctctaccttccaaggagaggaatatcaaaaaatatgtggacatgtctttaaaacgaacacacctacatagtaagtgggtgcagtgataccagaactttctgtcaggcttgaattctgtagtgtttctgcctctgtgtgtgtcaacgtttgaagagaacactgatgtaggatccaggagacctgttgttaattccagatcctacatttaccagcaatgtgagcttaagaattacttaaatgtttttggagctggaggagaggttgtttttattttctttactggaaatttggaatattgatgcatattatacctaattgtcaagaattttttgattctctaatgaaataacagattctgaattgatgcaaggccagcatcactgatggcattggtttactccatcttttcttctcttgcatcataattacctatctcaggattagaaggactcagtaaattccctggtttctcctttggattaatggctgctccttttagggtcaagaaataaaacttctttgtctcacagttttgttttgttttcttccaaaggctctatttttttaaagcaatttaaggctcacgactaaattgagaggaaggaacagagatttcccacatatcccctaccttcatacatgtataacatcactcacagaatacatttgttaccaaggatgaatgtctgttgacacatcataatcccccaaagtccatagtttaccttaggtctcactcttggtgctacacattatatgggtttggaccaatgtataatggcatataaccatcattataatgcatcattataatatcattcagagtattttcactgccctaaaatttctctgtgctctgcctattctctcccaccctccatctttggcaaccactgatgtttttattgtctccatagttttactgtcccactgtttttaaaaacctcctgatcgctacaatttggttaccaagacatttggctattgaaaattctaaggattgtgtttatggacctaaagtcacatccgcagattgcctcagggcttatttttttccttatcctctgtcacagttctcttgacctttcttttttccatagtgaaaaagccacatcaaacccttattctgtttggcaacttaacgttcctctcagagtccatattagatggattctaataattagacccctcacccaacacccaacttcccttcgtagactggtcctccagacttcccaggttctgtggttacagaagttttctccttattcttattgactgaacttctggtcctttgtcagtacatgtcttctcaaataattgtatgcctcctaggttttttgcctcttctgctaacctattttcctaggcagccacactcctatgtgataaagtagaaagggaagggcaatgagatagatagaccagagactttaatcttagtcatttgctaactgacttttaccagtattcccacttgtaaaatggagttcatagcatctgccttagagtgtcattatgaaaatttaatgacttaaaaacaacagtttcctccttgtaagtttcaggtatgacaaggaagactggcctgaatcagaattagcaggggggactttataatatggatgtttgaaactgcttctaagaaaatctctgagagcagagttagagaatgtgcattttgtgctcccctggtggttctcatgggcaataaagtttgagaataattactcctagggaaatgccctggactcgtgggtcctggtaaagagattcatagacaagtagcctttttattctatgtgctgaattgtcccagggacaataaagaacaggcttattgtgatacacaccgttttactgactgaagcgagataatacacttagaaggggatgcataactccctgaagagctgccttacctgtctaaagtaggggttaactaagtacatagatccatttctttctgaattttctctggcctctcttctcaatattttttttgggggggtatctacctaaatatgcccttggcttttcaatacttctactttcagtgcatttgtgaccttgtttaacaccttaactccaagtacattatgtgcatttttgttgactttggacctgcagaactctttctatttaagtctatttatcacagacttaaatgcagcttctcaacttccctgctttcaccagtattataagaaaatgcagactgctataattgggtccatctttcacaaaccctttctttctctacttacatattgctggttccaagcaggctgaagcagcgccttacagaagtagatggcaaaaagtagaccttaagaggaaaatttaaggctcagaaaagatgagcattttttactcagaatttatgatgctacctactacttcttggctctaggcttaaagtaccatcgcctagactatttccctcctgctaagaagatgaacagaggatgatgtgtttgaatcttgactttagggaagacttggatcaggaaagggatatccagagggagcaacaaaagtacacaggcatatatagaaggacgtttttttctctacaagggacataacaacctgtgagcctagaaacatgattagatgtttcatatgtgaaattagtagagaatagaggagaatagaattttttggtcatattataaagatcgttgaatggttgggtaagatattagtaattttacttatcaagtgctcagaaggcagaaaaaaaaaaaaaaaccaaaggtcatatgcaaaagtacattggaaagtggacaatggatttatagtcagagaaggtgtgttctagttgtaacactgggaatcactagttgtatgtccttggaaatgttatttaagctttctatttcctcaagtgaggaataatgacaatgctttattcatgggctgacttgaggattaattgaaatgacatgaaaatggctttgtatactctaaaatcatattttttcatattttatatatataatatacatatattttatatatatgtaatatatatattttatatatataatgtgaagcattcacttcatttatccctagaagatgggtcagtcccctgactgtctcccatcctactcccacacccttgagatgaaatatgctcttcctaacctgctgaggtccccatcttcttaaatctgtccctctggttggtccttagtcaacactcttgcctcctttcctcctcctctttacctagtcttagctagtttttgtaaggaaaaaaatcatctttgcaagcatgcctccaaggatccacttaggtccgtggtttctctgaatgcttgtttctgattggtgaggagttggggaggaaaacagtcccttgaatattagtgacagggaacaaaagcacaaggaaaacaatctgattgacactgccaaatagcaccttgttgagcgcagatcttgcattccttacaatgctaagaaccgacaagtcagtcaactactgaaatcagatgaagatatcagactacagatcaggtcagcgattaaagaagattgtggatttggtgccatcagaacttcagtgatagcagaaaccagttgggaggacgagcccaccagggaaagtgcaaagagctgagggtcaagaactgaaccaaagagaggtctgtactccagaagtggtaggaactagaagcactaagaaaaaggagtggtcagaaagaggtagaggattctagttattaaaatgaaattaagtgtttcttgaaggaaatattgtcactatgtcttcctcttcttactggtcctctgggtgccaataatttgcacgtctagagatgcaataaaaattgttaattaaaagaaactgtttaaaatggcattttaagcttgattagcattcccctttaattatttttgatttttaaacgttttgcctaaagatatcaaattgcatgtgctttatccatgtgtttgcacaattacttatcaagtatatgggaggagggtcagtgtggaggtggtatcactctgtttctctgcttatgtaagggaggcaaataaagctagagctgtcaatgtgtcgttgagagcctgcattggtttctcagactacgctaacaagttggatggcttaacacaatataagtttattctctcacagttctggagggtagcatcctgcaatcaaggtgtctgcagggtcatgctccctctcaaagctctagggacgaatcctttcctgccacttcctaggttctggtacttgcaggcaatccttgaacttccttgcctgtagctacatctacatcactccaaactcttcctctattgtcacatggccttctttctcctgtttttcttcacacgatcttcttaaaagaatgtgtcactggatgccagtcatttggggctcactctaatccagtatgattttatataatctcagtcaattacatctgtaaacaccctatttccaaacaagaccacattcttgggttccaggtggacatatattttggaggatactattcagtctagtacatagctttttatctgtcttatgttgatgtactgtaggcaatggtgtgtatggatctggccatgttgaggtgaacctgatgaatcctcttaatgcttctttctagtgaagcttctgttcccataaacttggctattgaatgtcaccctggactagacccttgtctgtgtatttgagacattgtataaaaacagatatgtattttcttctaagagtagaatttcttttggttgtgtatatcagcagagtacgtactgattatagacagaattctgaaatgcttatgtcctttagatgcccttagtaaatgtgtgtgatcatgaatctcagtggcagttattctgtagacttccaccatacaatagctggtcctgtgacagcctgccaagttattattctatatgtactagaattagccagagataatataaatcaagttctgctctttcatgtgcaacaaatttgagtttaaataacagatggcttcagatagttttctgagattaaacctacaagaataattaaaggaataatctagtaaatactaataagatttttgaaatgtaaatggactgtttttaaatgcaaaggaattcattaaaaaaatctgccaacaggtgagataatagattttgggaagttttagcaggtcataaatctgtaaagaagaattacagttaaaaaatatttaatgatttttcatgggcccaaagtcttatccataattcactgaacagggagtgaaaaaaaaagggtgattagcatttccttttgatccatcggtaaagaaaaaaagtaggaaggcatgcaggttctctttgagactcagttggctttttgaaaatgggaaaaatactgccagcagtggagagtgattactactcagagggaaataacattatacagaaggatgtagaaacttcacagaattagacatacgcaaagtaattgagtgattgatgaagatgagattatagcaagactagaggaaaatatagcacattgtgaaaaaaggcaaaggactttctgtaccatcagctctgttctctcactgataccagttatgcaatccaaattctgtatctatcctcagagatactctagtggcacgtcgaactcaacatatataaaatgcaacttcttatcttccttcctttggctattttgcctcttatcatctcattacttttcatggcagcaacaactcagccaaggttgaaattgcaggggatcttgaatgcttccatccttgcttcctaaaagtgatcttcagttgctatttcctctacactatgcctctctattctctcacccgttccccttctgtccatctccacttcagatcccgtgtttaagtctgttacccatggtcaggaaatcactctttctgctttattatttatccaaaatgccagatgaagcttttaaaagcatggttccgactctgtcgtgttactacttaaatacattcaatttctgggtaatagcgtttgttttctactttttaagcttctagtaatgctaataattgcctttccatatcctatgttcaaactaaagcattctacctgtcatcctattagagtgacatagttctattagaactatgcattactgcttctgtattgattcaaactatttactctgaaataatttccctcttcctcgaactctagataccgagcaggattaaggtgaacaaatagctatttctataattggacaacactgagctatcatactgtcacttggctaactcaactacttatgggcttctgaccttgtagtagtcaacaatcatgctttatctatttagaagcaaaacacttcacccatttagggacaaactcatatggatcttggtgggaagcagtggcttactccctgccataggagctcatggagctcagaacacaccctcagtggtgtttactccctgtagcttccttatatttctgcattttgccaaggctagctctcttctcaattctcaaattccaattcgatccttttcccatttgtttgtcagattaatttatgtttcatctagcatgatgaaaaagatctgagtagtagaatcacagatcttagtaggtgtggcatttgatttgggccatgaaggattaacatgttcttgaaggaatagatgtaacattattaatcacacattaatataattattttgggtaagaggttttgaatctttactatatgctacgagcttcattcgtattgttttcaactgtcggggaagagggataattccccctagcttttctttaaggttcttatggctgggcaaataattaaagaggcaggttagcaggagaaaatcaaacaaagtttatcagccagctggctgaggctgcctgtttaaaaatctttagctacagacaaggaggactttggggatagtgattttgggcttcaaaggggagaaagacaattgacatagagatggaatgtaaatgtttcttaaacaggttttgctgggccaaaaaaatgggtttgttgatgtccttttatcatatctatttacatcatactatagctgtcatatagtatgagctccttcctggaacaggccttctatgttaaattcttttaggcattttggggacaggtgttgtcggatgctcttccttattattctgagcctttattgtcttcagttcgaaataatctgcataccagagtggcacatcttggaacagcctgccctgaaccccatcataactgtcaaagtaactctttataatgatgatatatagcagacactgttagttgcctaacggattttcattttgacatcttccttgctaagagaaccctgaatttgtttggagtagcaatgtactcagcaaaaatatttggtttcccagtgtcacatgagacaaggaataaccacgtttgttctttttgagcaatggggcttatcaggtgacaatctcttgagtagagtgtctttctgaataaaaatgcaaagagaagtactttggccccttctcccttatttctgactcaaactcagaagtaatgcttagtggtaaaggagctattttaaaaccaaggacaaaagctatatatcaagaatggtggaaaaatatctactcaggtcttttgtccatttttaaattaggttattattattattattttgctattgagttgcataagttccttgcatattttggatactaacccctattggatatgtgatttgcaaatattttctcccattccataggttgcctttttattttgttgatcattttctttgctgtgaagaagctttttagttgatacagtcaaacttatttttgttacaaacttttttccaaagaagacatacaaatgacacacaagtacatgaaaaggtatttaacatcactaatcatgagggaaatgcaaatcaaaaccacagggagatatcccctcacacctgtttagatgttgactatcaaaaagacaagagataacaaatgctggtgaggatgtggagtaaagggaatccttgtgtactgtaggtggggatgtaaattagtgcagctgctatggaaaacagtatggaggatcctcaagaaattgaaaataaaactaccatatgatctagcaatctcatttctgggtatatatccaaagaaaatgaaatcattattttgaagaggtatctgcattcccatgttcactgaagcattgattacaacagccaaggtatggaaagaacccaagtgtcaattaatgaatgaatggataaagaagatgtggtatgcaatgggatactattcggccttaaaggaaatcctaccatttgagacaacatggatgagcctggagagcactatgataagtgaaataagccagacacaggaaaacaaacactgcatggtatcacttatatgtagaatttaaaagaagttgaactcatagaaacagagaacagaagtgtggtttccagggattaggagtgtggggcaaattgggagaggttggtaaagtatacaaacattcagttataagatgaataagggctgaggacctaatgtataccatagtggctatagttgataatacatggagattgatttagatattttgctccatgtagccaaatgcaatcctaatactagcaaactgagtttaaatagcttgcttaaataaatatcccagtttatcatgggaaagtcaaagtttgaacacatatattttgcctgctaggtccatgttcttaaccaacaataacttagtttattcaaaatcaggtacattaattctttttcaaagcgaaattcttagccattctagcataaaaagttggaacttcttagaaggcatttttttcctcccaggaataaaattcattttgtactttaaaaaaatgtgtctgagaatactaagattccatcaggtactgaaagttttctataccaggcatgactgtaaaataataaactcttttaaaacaatctaccagaattcaaaaatccaaagtagcatgtttattcgatgtagtcaccatcggaggctgcattcttatttctacaatgctgcctcccatttctcaaatcctctgggcactcctgtttgggaaggggctatccagtcagtctatgagcctcacagaaattaatgttatggcttcattttaaagtgaaaataagatgaccatctgccttagttgcggctttgattctaaatagctttggggggttttaaaaatcaaattgttagcaaaatgatgaagacttactacactttgacattataaaaacataatgtacctggcatcatcccccagcacttacctcacaccttgtgctctgaccatacccacctctctatctttgcttccttccctctccttcctgcctttagaacttcaccggggctctttcctctttcctgtttctaaatttcttttcctccatccattcctgagcatttcatccatgccatcctaggtgcaggtcatccaaacctccttgagaaaatcttcccagttcctccctcttccctatttggatcccatcctctatgctctcctaataccttattctatattttgctggtgttaaagttacttatgtatgtgctgtttctcctattggcttgtaagctcccatagagcatcatagagtcaagactggaagtgagaggggcctaagaaattctcttgtccagccattaatgttacagatgaagaaactgaggcttgaagagattaagtgtcttgcccatgttttcacagatggcaggagtataaggttcggtataaggttcctccaatcccagggtaattccactacatctctttttgcattccatacagagccaagcacagaggtatatccagagtacataagcaatgattgttaaatttcatttttaaaaatcagattggtgactggcaaaaattaaaatgtttaacaataccgagttttggggatctatggagaaatgagaattttataccctcacgggtagaatgaaaattggtgcaaatactttagagaaaagttagtaataagtagtagagatgcagatgtcctgttgccacaatatggaaatccattgctaggtaaataccctggaaaaatcccctgatatgtacacaaaggagatggacacaaaaatgtttataggtaaaatttatgtggtacaacattttgtatatcacctaaatgtacatcaataagaaataaataactgaggtttattttttaaattataatgttttacagtgtgaatattgatgaagtagaactcacatatcactatggataaaactagcaaatataataatgaatgaaatagcaaattgctaacaaatacatagtatgatatcatctgtgtaaatatttaaatatgtaaaaaacaatgccatattttacttaaggcaacatatatacataggaaagtgtaagtatatgtatgggaataatgatcaaatgtagggaagtgttgagaataagggcagagggagttgacaggaggtagatgtgagtaagaaggggtaaaaatagtctccagagcattggcaatcaattattttaaagctttgtgattggtacatgcatgttcattttattattctttatactctttgctatatgctaaatatttaataacaagttttaaaaaggaaccttaaaaattggcaacgccactagcttgaaggatggttccaaaatagaacatgccaggactccctgagctatgtcaggataaatgaaaaaagtgtataatcactcagatgactgttttgaaggtaattgctgttacctggatttatacttttaaaaatgtttgataaaataatccaccctatcctgttgcagtaatgtttgtattatggccagttagctttgagtgaaatgactgtcttggcaaaatatggtcagagaaacatagtgatatgcaagaagtacttcaaaagcaaaagagccatgtttagagtgccaacttgtacatcctggattctgcatgtggtaggagagcatacactttctgcatcattcgttttgtaacaagtgctggcctcccatattgcgccaggcccagaaaatgccagaggcaagggagatgattcattgattgaggtttttgtttttaaattctttagttactaaaagtattgtaagcttttgaaggtagaagacagttcagagaacatctagttcccgcctttggttcagaaatggagatccctaggtactgagaggtacagttctctcccaaggtcacaaggagatttaagaaagaaaagggcagagacaagaagaaaagtaaggagttttcccatttcattgtatgagctgaccactcagtagttactggtggctggaatcagaaccctattcttctccccagcaaattacactgaagtcggtcagggacagatccttcatttaaaattgggaagaggaagcttctaggaatctgcccaggagaaatgagaacatatatctagaaaaagacttgtgttcataagtttatagtagcattgtttgtaatagtcaaaaatggacatagctcaaatgtcattcaactggggaatagaacaagaaaatgtagtatattgatagaatggaatattatttagcaataaaaaggaactaagtactgatacatgctaccacagggctgaacttccattatgcgatgtgaaagaaaccagacacaaaattatacacatagtgtgtaattccatttatgtgaaatatttggaaaagaccaatttagagagacagaaagtggactagtggttgcctggggctggagaatgattgtaaatgggcatgagggaatttttggtgggggggaaatgttccaccgttggattcctgtgatggttgtgcaactctgtaaatttgctaaaagttcttcaatcgtacacttaaatgggtgaattttacactatgtaaattatacctcaataaagctgttttagaaaagggagaatgggcacaatttatccttagaagactcaaggttattgaactccatccactccaccaactaccctattatcctcctctaaaacttatattcttaagatgcaggatagtataaacttatgcccctcagaacgcattattctgtgacaaaaactagcgggtttttttgagatcttactacatagtgggcattttgctctttttgtctttttattcctcaccacgaccttatgagatagacattgtattaaccctattttaacaatgaggaaactgagtgatttgttcaatgtcactctcttgtacaaagctgaggagcgacttggactctggattcccagagcctaaactctcaaccacaatgccagtgcttgcctattaggtgctctatgaaaggttgttgggtgaaagaaagatgggtttttgtcgctgccttcctgaactggctttgcaacagacagtggacccttgtattaagagctatttctgtcacagttttagtacattttaaaacataatgcccttaagatttcttgcaatttatttctaaagtgatatgataaagtattgatatagaaatccccagggttttggactgagttattaaagaataagcaggtgattgctttttggccaccagtcattagtcatcaccagaagaatccattctctctctttaacacatctttaattttctgtggcaggtttaggtaggagatttttattgatgagtgtttttttttttttttggttgttttcaaagagagaatgctaatgtgtgttgtcatgtttgtttatttgtttccttgatttaaaaaaaaatctttcagatggaacaaaatttcatgatgaaatgtcagcaagaggtagaaattatttttaaattaaacaatggttttgataatgtaaagtggaaaaaaacaaagcactaggattagattcaagaacttatgttaaaaatctgaagatattaacactttgagaagcttactttcctcattggttaaataggaacaaggctatgtacctaacaaagctctcgtgaatatgaagggtgtataaatgtgtggcaaaacctatgtgcagagagtagatgctcaatcagggccgattgagtttatttatctttaattattttattttattgtatttgctgttcaatacatattattttaagcactttgctccttcctggtccctggggttaaaatggcatacaagagaggcagagtccttgcctaaagaagtttatattctagggggaagacaaataagacataaatagaactattattaaagaaaaaaaaaacaattgtgttgagttaagaagccatcaaatgagataaggagaacagatgaaaaattttgtgttaccgtggggttgagggaacaggtatttaaataacatggtcagggaaggtatctctgaggagatactatttgaacaaagaccggaatgctgagatggagccaaccatgaaaagcataaggggatagcatttcaggaagaagaaacagcacgtgcaaagctctgagcaggtgaagaacttgtgtttcaggagctcaaagatcactgaggctgaaacattgcaacaattattagagagggaggcaatacttgataagccaccaaaatgatttggaattttattctaaataaaatggaagccactggatagttataaggagcaggattattcaatatatagcttaagaagtccctttgcgttggaaggagtacgagaagaaataaggaggacagataagatgttgtttcaatactaaagacaagaagtcatgggaatctttactaatgcaatacattacaagagatggagagaagggtttgctttattttgcatgaagactcagcagggcttgttaaggattggatgagagtagagaaagaaaaggggtcaagaccacatcaaggctactgtgtatgagttctgacttgagatagtggatggagccattccactgatggggaagattaaggatagactttggacacatcatgtttgagatgtctctgagctatttcagtggaggtgactgagactgagatggaaaagacatttggagtgctgggacttctgagatggagatgttattcaggaatctttactgcaaatatgataaagttgaatggctgtaggtaaatggtgggggagctccattattctgacaataaacaatcagaatccttggattcagctccatagagtacaccatattaattatagtatccactgtgtctggtagcaaaagagggattaacataaattcccaacaggttttgcaatatgttgcattttatgggatggggcaatcaaatttattgtttatgattccatttttctataaataaattggtctggattaacactatattacttttaaaattttagaaattcctggaatcacttgatttgggtttatggataataatactaaactgcaagatgttgattttatactaaactctgtacaggcagatgctcttattatcgtatttactattgattgaggacctactatgtgccatgcattgttataagtacttgggaggcagagatcacatcttttcccacagagtgagtctgactgggaggagacagacacacaaagtaattactatgaaatgtggtaaaagtcttattctggggggatattaaagagaagggactaaaagactcataaagattggaaaatatttcatgataagcctgatatttaagttgaatcatgaaggatgaacagagatttctaggaagagaagataggagagagtactccatgaaggctataggtgcaaggtagggaaggtgaaatagagaaggagagagatcatgtggctaaattgaatgttgagtgtagcatttagtagaaggcttgacacatatcaggcactcaataaatacctgttgaatgaataaataaacgaatgaacccaacaatttttgcttactcaatacaatttgtttgactccaatttccagtcaaagaaaataggagaagtactcctcgtgtatagattttatgtattcatttgagattcaaactatataattgtatatgaaatttgtagagacaatataaatgagtatttgatagtgtggtaaaagtgtgtatgtttatgtgtttggagagagagagacagagatcagggaaggagagagagagaaaggaaggaagggaggagaaaaaattattttgaaaaacatcttatggaaaatgagcattcaaggaaattgctctaaggtgacacagagcataagatgtgaaacagaaaccatgagctattgggctcaggaagggaaacacatacctgaatactggttttagccaaaaaagcaaaagatagtcaaagactacagtcaaagtttgtgataggaagtcaaaatgagagacaccatcaaccaaggaagaacaggatacagtcttacacatgaaccaggccagagtatcaggaactgggaaaacagagaagtcaataggagattgggacatagagcaaatcaggagttaatccagtttgatttcagtgcctgattcacatttaaccttgaaggaacagatcttagctttctgaacccacctctcagtgtctaaaaggtgcaattgagccctgccaaaaggaatgggcaaggcatggctaaaaaaaaagtgggcttttcaagaagcaacacaagacatagggagaagtaaagacatggccgaagatggagtggggagattctgctaaaattcatttgcaaaaggtaatcattcattggagataggagtaaccaagttcaacgacgactttgattatctttgaagaggaagctatagagctcattattctttaaggacatcacatttttgttgaaaatcattcatgtggaatattttatgaagtttcaattaaatttgtccaggattaaatgtgaatttaatattccttgtttttgcttagagagaattaatacataaagctttccctaaccttataaattcacaaaataaatgtcatcactcagttttctagtttatttgcatatgaaaatggatagcacgattatttaattcttggaatttttatagtcataattctgtagccataaatgttatagtctatagttcttaaaactttggttccactttgttccttacagtcagtgcttcaaaagaatatttcacagaagtattcatgagattctaagacttattcagtttcagaaatttctataatgtatccatgctgatcaatttatacacttttataattgtacatttaaaaagaatgattctcacttcttagctttgtattaatcaaatatcccatgatgtctctgctgcaattatgattaatttcctacaagtggatatgccctctaacactattgagcatttaagttatataatagatgatttataaaatgttaataatggtcctcatatattagatacactaacctaaacaggaaggtatgctttttagcttatgtagtctggatactttgcttttaaggagttcttctacagtgaagaagggaaacttgccaatatgttgattgtgatgttaagatcctacttgagatggccttgaattcatcacagtatttattgtcattcaagtggacttgaaaaaaatctggaattggaattttttaggtagtatttataccatcctcccatcaaatactactgattttactaataagacttccttatcacaaactgccatactcttctatgatttttatacctgcatggactggtatatagtgttcccttctcttagagtggttttgcttgttggcctggaaaactcttattcttcaagacccagctttggcctcacctcctttgggaactcttccttgataaaaccttcagtctcactgtcagcaaaattcaacctttcctaatctgcattccttagcactatatgcctttctctaaagtgttaatgatgttttgaaactgtgtgcttgcacattttctcccacactagactgaggggttcttgacagcaataatcccatcttattgttttttctatgctgatgcctaacacagttctggtgcatagtaggcattccatatatattagttgaatgaaacctattggaaagaaaatctcaaatggctatttaaactttgatttatttaccctctcctgagtttgtatcttgcctcccaacggaattataaactctgtaagtatagggattgggtgtcttacttctctgtgtcctcttgggagcacataaacagtgtttttcatatttaggtaatcaaatactatatattgattgtcagtcttatttctcactcagcataatatcatacaggaaatagagtgattatgtaggttgttttacacaagtttagtatttattgaaataatctggatgttaggttaattttctgtttatatgagaccaaggaaatctggtatattttgtggttatataagaaccaaagaaggaaaaaatgctttgtccttaagagatgccattttatagatgtggccgtaattgtctcgtacataatccaacagttagtgaaaatttagcaacacttcatcaaactcatggccacagttgttggggattcttttcagatttcatttacaccattaattcccttcagttcaattcagcgtatactaattgagtgtttactatgtgttatgcattaggcaacttgctgagtgttagatataatagaaagactttgatgataagcagactggaattctattcatttctggctctttttgttaatatctaagtgatttagggcaaattacttaactttttggacctcagatttttaatctgtgaaatggaggatatgaatcttaacctcagaagaggttataaaggaaacagcgctggcacagagtttggtatctagctgttgctcaacgaatgttaaccttgtgattcacttaagtggagtgacctttcttttttttttaactatttcaccattttatagtagaaaaaggaagcataacggactccttaagcaggcaggtaccagctacaaagagacaatgatacgatagggagtttccagatgtctttattttaatagcatcattatgtatgggatttttaaagaaggatgtgtgccagggtggtgttataattcagtttcaattatagtaactgttatgtgtagcaggctagccaaaggttggcaaataccctgtgcccaggctctgaattcaatagcaataatggcttcgcgtggctacttcagttccccattactgtctccttttgatttagtggcagccttctccccagaggtagggtgttgatggcatctccttgactgggtcaggtttccgggggagatattcactctgcctgagaaatgctgtaaatctatttcttatatttcttgttattaggtacagtggaacaagatacaattttctatttcttttctttctttcttccttttttggtaaattctgcccacaccaaacaaagccactttacggaagcattccttacattctatggattctatttttattgagtcaccaatgaacatttatttagtaaaaatatggtaatgattcacatctttcatatttttgaaaaaggttccagaaagcaataccagtcttgctggtgtatttcatagagaaatatatgccaggaagaaaattgagatttcctcccatcctccctccgatctcccctccccttctctccttcttcttccttctctccctccttccttctttttccttcctttctttcttcttcctcatactcctcctctttttcttctcccctcctttcccctttctcctcctccctcttttatgttttactactccacttaatgaacccccttgccacaagtcctcatcttattgtctacagtttcacatttcactccattccattcctgttagttctctgttgtagcacacttagaagtcttctgtattacccatatttacatcctcccaatatttgtagattcttatcgtatcccctggttgtcacttagccacgtaataggcatttatctcctttaatctggcctcataaatcaaagctttcttttctctaatcatttttttatcattccctaaattgtttccaatttgtctgcgtcattctgaaatggaaatgcctcagacttatgcaggcatccaaggctgaaaccttgttggctgcattttgccatttttttcctactgaacaaacatttcacaacaaataagtgtagtatggttctttatcttgccagtttattcctttgcaaatttatgcagaataagtcctttgtgaggttgtctgaagtagattaaaagatccggctttttcccaggagtcagaggacccagattcaatactatttgtgacacttgcacttagattcagtgtaattaatttccctaatatttaatgcagaactaatatctactcttgggaagagggctcagaccagggtgagctgagcgaagtgcacagggcacgtgcagcaccctgagagtgagcgcctccttcaattctgcacccgaggcgcctcgcttgcttcacccgagtcccagcccttctcagaaagataaaataataggtgtgagaatgctttgaaaaatgtgcagacatggatagatataaggtattgtcatcactattcttcatcagttcagctcaacatgatttaatagcaggggaattattacacacgagcttgctttaccaagtccttctctctagtctcatcaattcactcttccaagttttccagagcctgattgtgctatcccatgcttacataggcacctccaagccaaaactaacccagtgtactattcagacacagaccatattatttcttcatcctgccattaaaatgtactcacctagattcccattccctcagagctctgcttatctgctttcttgaaaatagcaaacttatcagatgaaattgcatttgttgttgtgtctataggaaatactggattaatgagtaatctatctcaggtcacaaatttgcaatttcattaaggcattttgtagatgcaatgccttattctccaggtgctctaatacgtggtttataaaactattttgatcatgaactacagtaagaaatatattttttatcatgacccagaacatgccccaaaacacacataaacatacgtagaaaggatttcgcaaaatagtactgaccctttcttcttgtgaagctcgcacctattctattctgttctgttctgtcctgtcctgtccttttccagaaaatagatttcatttcattcttttctagtgtactcagttctatactactctgttccatttttaaaaatttctgaccagggaccaattaaattgatctttccatccattaatatgacacagtatttttttaaagaaacactcgaaaggattggttttcggtagaactatgcggattgctgtggaccagacttttaactgatgtttgtgtgcatacatgtgaatatctgtgtgtgcctatgtggagggatggaagacaatgctggactgacttcagcatgagtagaagggcgttcagcttgatggggatattactatctcatgtgcactgatatttaacaggttagtaggtaattcaaggatctgtaaaactcagcaagaagtagtgggcacatactgggtggacagccggattaccatggtggcatgagaaggcaatctccagagatacaggtggcagccagcacttgggaactttctaagcaaaaagaagaattctggtaattgagaggcaggtactagaggtaaactatggatttagatataagggaaaactaagtacaaactggatcctaatatcacagcagggctgcaggcaaggttcattccacattatataatgcagctgtggtttgctgctccttaaatctgttcttactttagacatgatacatgcaactacctgcaaatgtgaccagatgagcatagctgcaagaaaaaccagtccaaaagtgcccagaatgaacaatgcctggaagatcttggaagcagacaggccttggccccttttagagtaatctttggcatttccctctttttgcctgtgcatagagcagcccttgagtaccacattagaatctgtacctccctgaatgtatttcaatgtattttttctgacattttgtgagttctttcttcaaattgctctgatatgtcatcttcttagagtggcacctcactctttccaggtgtgcacagccattaacaaattagtaatattccagacttcatttttttcttttacaggaggaattatattgttttctccatagcttgtttatagcttaaatataattctttcctaaacaattcctgattgaacaactcttcatgtttctgatgtccaggaaaaatatgagctcgaaagggtttttatgaaccttataaagttataggattaagttcatgcagagaaaagtaagcttctctttatgccctggctctttaacaaagtgaatctcaagttcatgtataaacttccagttactaaggatacgtatcaaggagcactacaaaagtaacaaggttttagaaaggaaaaaaaagcaaaaagtactgtgtcattttctttttcattatttggtggtacaatagtaacaaagtactttgatacacaatgcataagtctcaaaaaatataaaagtaagtaactgataaaatatatagaaaaatgaccttttcaaaaatcccatttcaaactttcagtcaggagattaagtgaatggtgaatttaagatgccttttccaaacggaatagaattgtagaggctcatttctaccctggatagcaagaaattaattactaggatcgctttgactcataatgatgctgtgaacttctaattatcccaggtaatgtaggctaggatagtacataattgaaattcaatgataacacaaaaagtttattctaaccataaatttcaacctccttccctaggaaacctttgcagaagccagtgaaaaatagctaagttgcctgcacgtccttttacctctctctcttgcatagctccctttttggtgacgctgtttacaagatataacgtaggtcaagatatgacgagaaggggctatgcctttcctgtgagttagctgaagcttgagttgtatttaatgctgatgaaagtgaggacacatgtgagcttcaggaagcctccatgttctgttgatttcacgcatgtagaaacaatctgcaggtggaactttggccaaccactccaagctttagcagcccacggagagttgctggttaggtggatgggatactcctggtgaggtgagagagagaagccatcatgagaaactcgagcagctgccaaggtgcacgtcccagctccagggttcacaaagcatccaccatgggagccactcactgttttcagaaaagtttaccgataaggatgtggcgctaaaacaccgtctgttctcactctcactggtgcagaaaattggaagatttgagtttaatggcagccagaatttaaagggaattatcgaaagctgagctccaaaatgtttgagcaagggaagcatcattggaaccaccgcattactttctaacatggcttctctgaagggtggaagacccatttgcatacacaaattctgacagtaaatattcacgcatacacactttctgttctttgtagtcataatttgtcaccttatatatatatcataggaatgaatattttcttatttatcagattgttgaaattatctaattgttttaaaaaaaggttgatgtaaatacttatttgcctatttcattttctctatgaattttattgcatttttttcccgaagggaagagaattatagaaatatgatttaaagtgttttttggacactgagtgtagcaaatatatttttctgattttgtgttaattaaccaaaatgacttatatgttcattaatcaaaatgtgttgatgaactttgtgttaaaatcactaggatttaaaaattatgaaaaagggacagttggcacgtgaattgagaatctgatcaaatccaagatatgaaaacaattggaaatacttgataccgcaggccagatgccaattttttctcttgctgatgacaaacagctccatcccacaaggacactaaaccacctttccagtgtctcttgactgtctggccatccaagaagtgtgaaggccagagcagctcataagggcaaattgatgtcacctgtgagaataccaggtcaggtagtttgggttcctaaagcaagggaatacatgaaaccctaagccagttgttcccagtgcagaagctggcttctggaaagttggtttaataatttgtgaggctacatcgatcagtggggtagtggctagtaaattattattttgacaaaataaagttggagtttaataaagtaaaaacttagaaaataagaagaaaggcacaattctgcacattagtgattgtcttagaacctctggattgtcttagaatattctggattgtcttagaatcattctgggtttttccagttcaactagctattttattggatgagtttctatacttgctaacaaaccggctcttaaaatatctccttcttcatgcattagtgtcatcaagcatcaagttgccaggttgtcaagggtctcacttttcctgcccagaagtgatgaatgaaactctttcacaccaaggtgttagtgattaatgttttctgccatttaagttgttttcagggcacctggaatgcttactgtgaaaaaccaaaacattgatgttgggattctaggcttggtgactctttgttggagggttatgcatctggcataaaccctccttgtgctctccagataccatgacattaattatttccttcttcccttcctgccttccatccgtccttcattcgcttcagtatttactgatcaactaatgcattccaggcacgtggataagtactgaacgtagaaagacaatatataatccctcctctcaaggactcctagttacatagaggagatagttatatcaaccagtttataaatcatgaaggcatcatagttaagtacaaagcagaaagaagaagggggtcaatcttgtctgtggggactcatgaaagaccccacctaagtgaaaacattttagctgatttttgttttttattttaacgattgtcacctatgctaacatctgttgccaatctttctttcttccttttctcctccttctccgcctcctcctcctccttcctcttctccccaaagccccttggtacatagttgtacattctagttgtcagtgcctctggttgtatgtgggatgccacctcaacatgacccaatgagcggtgccgtgtctgcacctgggatcaaaaccggtgaaatcctgggccaccaaagtggaatgcgctaacccaaccacttggccacaggctggccccttagctgattcttaaatgatggataagaatttctcagaaggaaaaggaagcgattggagaaattaacctggcatttgggccacagcagtagttcagtgtgacctgaacacagggtgtgaagacagattgttaggccatgaggctggagagctcctcagagagttgggagggagctcgtctttctcgccgtggtttggggatttcattccacggtcagggagataatacttaaaatggaagccagagaatgacatgtttctatcactctacagcaatgtagaccgagggtaggtagaaaggggaagagaggcttaatagagtttcaacagccacaggttgagtgaatgccgtatgccagacttggcgctagagtctccgaacaccttgggaataaagtaaccataacacccacctcattttaattataataacagcatttgtttatttttcacttggtattgttctgggtgcttcacttattttaagtatttcaactcaacaacaactctgagatgttattactatgtgtattttgtaggcgaggtaactaaggctaagaggtggtatctgcccaaagctatctagatagtaatgtatcaggttaggatttgcgcgcaggcaatgatttcactatgatctactgtaacgggagtaaaagagatattcatgaggtcagccataatcatagtgagaacagagctaggccacagttgctattgcaacaagaagcagcaaaaagagtacaggaataatctactctgtactgaagggaatctggaagctaaagtgttagggccccaaccatgctcctccttactctttcctaggtctttctgcttgatcgatggatgaagccatccatctacattcagtggatgaagccaactggtcaatgttcagtctagtgccagagtgggccatcaattgtggctttttctagtaatttttctcctattgctgccacaagtggctggtggacagcttccactccaggacttgaaatctgtctgttggctcctgtgcattcagtagccaaatacccagtagctccatgctgagcctcttccccaatttagtttgaaaaaaattatgaaataaaaattggccttcagcctcctataaccacatgaaacctggcatgttacttggcagttatagcagaagtacactgtgaaggcagaattttaagatggccccaaaattccacatcctggtgtacacaccctgtaaaatctctttcacttgaatatgagtaggacttgtgactatgataggctatcattaccaaattatggtactatatgtggcagaagtgattttgcaggtgtaataaatgtccctaatcagttgactttgagttcttccaaaggaagactattctggatgagcctgacctaatcaagttatctctgaaaacaggtcagagagatctgaaacataagagagattttccttctggcattgaagaaactaaccactgtattgtagagagggcaaggcaccaagagtgacttctaggaactaagagtggtacctgtccaatagctagcaagaaaatagggagctcagtcatacaagcacaaggaaatgaattctgtgaacagtgagtaacctcagaagacccagagctgcagatatggtcataaccttggcctacactttaagccagagtagaggacccagctaactcataagcagactcttcatccacagaaactggaacaataaatttgtgttgttctaagtcactcagtttgcgataatttgctacacagcagtagaaaagtactgcatctcctaatgccacagttcagagaggtgccatcctcagttatcataccagcaggtcgtgtttgactgccttgttttgatgaccctctaaaagagtattagcctgttcatggctctatacgtaagtaaaatttaacaaagcatgccctcaattatctatacaaattaatctttaactctttgaggctactttgtgttattgaatgagttacatttctattgtgttcatgaaaattttttttcagtgtggtcctacaagtggcaagtcttctgtgggtattttacataaaacataaggttaattattatgcaaaatttgattctagcttgatgtaaatatcacggctattatactagaaatattcctgttgaaaagcaaggttattaaaaagtgattaagttagacttgttagtaattaaactacaacatataagtagcatgaataattgtcaaggggattgttgtgtattacttttcacattttgtatttcgttggtgcaataaaataaaagaataaacaattttttatactctattacagtgaggaggtacaacatcctaactgtaatgaggaataatttgttggaaggaacaatatttggaatgaaatctggctaaatatgtatctacagctaagatttccattaagcaggactaaaatctgtagaaattgccctgggtttaatgatcacataaataatcttgtttcaattacttgagtcttacatgagttcataataaatgaattatgcatcagacaacttggtgtcttttgttacttttatagtattgatttagataaagattatccctggcagagtaatgggaaagggctccacgtggctgctgttttgttttttattagatctaaaactgaaatatgtactttatctaaatcagcttcacacttctgaacattggcatccatcaattgctatttatttcactttgcttggttattaagatggctgcatatgagtgttgttcctctcttaagtgactacatttggagctaaaaggaggttgctccagggatagattcaagatgggagctaggatatatagcaattccgagaggcgtggaatggttcacagtcctatctccatttaagtttgcatctgaagctccctggagaaagaaagttgtgatgaatacagagaatgaatcatcaaaaaatactttgacaacatggaatggaaacttgtatctattcactgatgatttaaaaatatctcacttctagtagaggaaaaaactttctagagaagtttgtggagctgatggagcccctgtctattattaaccacatcgagtttgtaaaatgtgcgactctcggctggcttttaataggctggggaaatgtctccctggaggctgtgctacttacatggttgagagtgaacagattaatgcagtgtttctcgtggtgtggtccagagaagtcgtgcattagaattactggaatgtttgataaaaaatggagattcgtgggctctgcccaagatctgctaagtcagaatctctgaggatgagggttcatttttaagatctctcggtaattttgatgcacactaaactttgagcaccactacttaatatatacgtatagcagttctctgttctctcttgccactgctggataatattgctactatttacaattcccctatttatctttaactctgtgaggatgcactaaagtacagtttcaaagtgtttctgagttactgcctattgttcctccatttagccaccttaacctgctgaatagattgcctttgctcttcatcctgaggacaaggttgccaggtgaagcctggtatagtgttgctctctcactattgggagtcttggctagtcggggaaggttgagtgtgatgaatagaaggggttgatgagactgatggagcaatgcaatatgtccttgaaggtgaatttcctcggcagataacatgactccttgaaaatccagttgaacctgagtagagtctgtagtctgatgctacattaacaaacacctcattgtatctgctcatcctttggagtgttccagaatggaaggtgactaaagtgttctcaaaacccagtgtccaggaatgttatttcaatgctattcccatttttttctttgcaacggggatacctagattttccgtttctcttaagaagtgcaattgaaaagccaagtcgttataaatgtataaattcgtcttatattacttgtggtgaagatggtagtaaacttgctgggtatatgtgagcaatgtctttcctgtagaatctcaactcaattgaagatacactattctttcttatccacatggtggccgggaatcatagtagtattagctcattgaattgttctgtggatttattgaggtaatccatgtaaagcaattagaccagtacttgatgtgtagcaagggctcaataagtaataacaataatagctaccatttattgagtgtttacaatgtgacagtctctgttctaagtgctttgcatgaatcatttcagcaacttgcccaaagccatgaagctgtaaagcagcagattggggatttgaacccaatcaggcttctcccctctgcattatcctgccactttcataactgtgagtcattatttcttcacattattattgaaataaatttctcatttgataccttgatgcttagttttatttcagttctttttgaagggccttctatcctccgtattcactcaatcacaggatttagcaggcttcccttggattgagtaactgccaaagcagggggatgagttagaggcaggcaactgatgctcatttcatgtgacacaatgggagatggcctgaaaaatgagaggaagaaactttgtagaagcatcggggcaagtgatatagctggctttgactgttttccaggctctgggtgaattctatggcaagattagtcttcttccccattgggcatataatgaagactgcccttgctatgaaaaaaaaaaaaattgccacctactatcaatatggtacaaggccaatgcaataaagttgatcttggttctgttcttctacctccactgccactcaagcctaagtggggtctccctcctctcatgatattttccatatttccttaaaaactttcaccagagcctgccttggatggaagttgtttgcaattgcatctaaaacacagtctgatcatgatctctggagtcagacctgggttaaaatccttggttgaatatttcctggtgtaatctactgagccctctgttcctcaatttccccttataaaatggagatgataatggcacctaactcatagggttcatgtgaggatgcagtgaaagaatccatataaagtatttagttcactagtctatcagatagtgattaccctaaaaataccagctattatcatctaaattttgttttaatagattttaagcttttcaaagcctggtgataggatttttattacccttaccaccttgtatagaatctgaaccataaatttaacaagtgaatatatgatgaataatcagaaataagtggaatgaagttcagtttttgaccaattaattgaggctctgagactagggtatgaagaggtctcccaccacccatcgcatttaatactatccccaacctggtaccaaaaagacgcaaataaccagaacctcttccttccatgcctcagttcatcaaaggacagcctcatctttcattttggaaggaaacattggtttcctttcaaaagccatattgctgaaaacgaagcagaaatgggtacattcctgccagtaatctggtaattttgaataaactgcactttagggatatgctccgaagcgcaagagtaaggggacctctaattaaatgtgttcacttttctgggaacaggccaaggaaatcttcatgtggcagcagagctaagtgaaggattccccaaagttgatttgtggaaccttcttttgaactgtgagaccaggatctgcctctaacccccctcggtagtttcttgagagtacgccacgtagtagcttttgacaaattatcataacagcatccttttctctcaccactacttcgtgctcatcccttcccgcccccaccccacccccagggcaggggcacagaactttcctgtgtctaaaatcacgtcaatccacaaagagcaaatagtcttttaaaaagtcataataaagtgtttcagtgacgtttgtatgttatttcgctgacatttgtatgttagtgaaggaaagcgtttatcaagtgcttggtgtattccggtcactgtcaagtcctttgcatgggaagtgtcctggcagtcagtgtacagctctctcctggactggcttctgatgctttgggacccagagtaacgcactaactctttccaagcctccattgtttcatctgtaagatgagaatgaaaatctttatctattcaaagagtggtcataaggaccggacggtccacgtatttagcccagagcttggcaaagtatgtagtactcagagcctagtttcatttacaaatattattatacctaatcctcacaacacccccatgtaagtgtattggcctcattttgaagaccagcaaactgaggtctagagagtttaagtaacttgaacgaggtcaaatatctggagtcaatgcccaagtctcttctttctactggacattctagtatttctcttttgaaagggaatgccaggctctctaggaagaaaagatactggcttaatgtttcaattaagtccaagttgtgacttgaggctaagagttatggagaaagccactttacctatttatgctgcaatattctttcagctggaaatcaaagaatgggagtgggtgctatcccaggtacttctcaccctccactcctatggtgtttaggtgttttgggcaggaagaccttctctgatgccttccttttatcactttccttggtcatgtcagcaggaaccataaatcactcacattaaacactgagaaaagaacacagccaagatgttccagtgtgcagtgctcatggctcaccttagagagaggcaacagaaatattctctgctgtgggtgacttcctctgagtggtccctctgaagagagtgtgtggaaacctcacaagggtccataggcagccttggcgctctagataacagagaattatgtcctggcagatcagtgagagagcaagtggctgtttatggaagatgagagtatcagtcacattattcattcaatagttagtccctacttcttctgtgccaggcactattctaagttcagggctatcccagtgaacaaggcaggaatataaattggtacagccattatagaaaacagtataaagacttttcaaaaaattaaaaatagaattgccatatagttcagcaatccttcttctgggtatttgtccaaaggaaataaagccaatactttgaagagatacctgtattcccatgttcattgcagcaatattcacaatagccaagatatggaaacagcgtaagtgtctgttgatggctgagtgaataaagaatatgtgatacactcacgtgcacacacacatacacaatggagtattattcagcagtaaaaaagaaggcaatcctgccatttgtgacaacatggaggaagctaaaggacattatactaagtgaaataagcctgaaagaaagaaaaatactgcatgatctcacttatatgtggaatctatgaaacttgaatttatagaagcagagagtagaacagtggttaccagaagcagggacaaaaatctctgccctcataggcaggaagttatattctagcaggcagagatattagataatcgagtaaacaaatatccgtgtcaagtagtgacaatgctttggaggaaaataacacttgttcagacaatagtgactccaggatcaggggaaggggttctgctccatattgttcagttagcaagggcttcactgtgacagggcctttggagccaagatgtaaataaagtcacttattcatggaatgatcttgggataagcattccaatagagggaacagcaagggcaaaggcctgagcttatgaggaaaacaatctgaaaggaaaccccacaggccctgagaagaacaattccgctccgtgggaaccataactgtaacatccagatggagtggaaagaccctctctgacacttctcactagctccttgcctggacacttttctcagcccaagaacatcaaccttatcttattttattttaataaaaattgtatatatttaaagtggacaatatgatgtttttgatatacatataagtagtgaaacgattactacagtgaagctaattaacatatccatatcctcacagttacctttttttttgtagtgagagcaccagaaatctactgtcttagcaaatttcgagtctacagtaaagtattattgctatacgttaaacgtctggaacttatcctatataactgcaattttgtaccctttgaccaacatctccccattcaccctatctccctgcccctggtaaccactcttctttcttcaactatgaatttgacttttttagggtccacttttaagtgagatcatgcagtatttttctttctgcttctggcttatttcacttagcgtagtgtcctccatgtccatccatattgtcacaaatagcaaaattaccttcctttttaagaatactattctggggggcagggctgtgtgtttgtacgtgtatcacaatttctttatccattcatccatcaacagacatgtaggtggcttccatatcttgcctattgcaaatagtgcaatgaacatgagactgcaggtatctcttcaaagtatgatttcatttcctttggatatatactcagaagagggattattcaattacgtggtaattctatttttaattttttagcgacctgcatactgttttctacaacagcagtgacaatttacattcccactaacagtgtgctagggttccctcttttccacatccttcccaatccttattatcgtttacctttttgataatagccatcctaacaggtgtgaggtgacatctcattatagttttgatttgcatttccctgatgattagtgctgccgagcaccttctcacatacctgttggccatttgtatatcttctttggaaaaatgtctattcaggtcctttgctcatttctcaatcaaattttttttcttgctatagagttgtatgatttcctcatatattgtgaatattaatctcttctcagatatatgattcgcaaatattttctcccaatccgtagattacttttcattttgttgattgtttcctttgctgtgcagaagtgttttagtttgatatagtcccgcttgtctatttttgctttcattgccgagacatcaacttaactgtgaacacaaggatgcaaacattgatgttcattcgtatggttaactgaagggctccactgagttcccttgggtagaaaaacatagaaaaatcccctctggagaccagagatgacgtgtgtttaagtaataataatcctgtcaacgagcaggaaggaagatccatgaattcaattaactactagtttggaaacttttcatgttccaaagttgttggggttaatggagtaattagaatgtcacaaacagtttgggaggatcagtttgtctgtaatcttcatttcttgtctgataagtacttctgccaaagtttggatttttaattcatttaaaggtacgtgcaataatgggatgaattaatagactttgagttcaacaaaccagagtttgaatcttggtcccattagtcaccagcagcatgaccttgagcctgctatttaaactctctgaggcttagtgtttcctctgtaaatcttatctaatgatacctattttcagagtggctaaaagggaaaagcaatgtatagaaagcatctggcatgtggtaattacataattaatgatgacaattattatccaacaagcattatagcattcatctatgaagtataatgggcactccatggaggcattgtgggggggtgtaaagataatgaaggcgtgatttctgtcctctaaacgcttacccttaagttgcaaagatgtgtatgcaagtggctaaaatataatgtatcataagaggaaaacatactataaaaacacaaaaagggaaaactttcctctaattctggttgggaaatttcatggaagagttttaggaacttgacaggcagagatggtgtagaaaggtttttccaaatagagtgatttgaacaaaggcctggagatggaggagcgcagaatgagtttgggcaaaggaagctgagctgtcaggtagaactgatggacagaagtagggccaatgaggtaccatcctcaagctggtaccagatcctagggagactgggatgcagttcaaaggagtttggaccttattcagtaggcaaacagggagccatggaaggtttttgatcaaaggaataataagatgaggctacaactcagagtaattactctggcaaccctgcatcgtaagcataaagcatggaaagacttgtgataaaaacaagggctagttgtgattgagcactgtgttctaaatgtgttgctcattaactccctcaacagtacaatgagctaagtgctattatcatccccctttttacagatgaggacattaagacatggaggtgttaagtaacttacccaaagtcacacagctagtaagagatcctagacctgaatgcaggcactctgactctggagtccatactctgcactatgttgcctcaaaagccaaccaacatttagggatgcctgccttccgcctgctctgccctggcctgatctttctcgctctctcttgatcctcagtttgttcatctgtgaagcgggagacttgagttgactttctgagatgctttctagctcttgatttttaaaattctgtatttaatgtgggcttgatctattaggtcagtaatggaggaaacgaaaacatgaaatggttgtgcaagaaagagaaatacattccaagcaagtattatttttgatgtatttatttattttcttctcaaattttctctgcctccaaatttacttaaatcagttcttatgaaagcaagagatggaggtacacattgaaaaaaatgaaagtataaattttcgtgtattgaatagcaatgagctaatgcataaggtaactgctaaactctaaaatttgtaactattaagaatatttattaggttagcagacccatgctttgaaacggtatgatagttactactcaaacccgaatattagttcacaatgactcagatggagccctaggataaggcaactcattgaaaaggagtgagtcaatattgatccagtcccttaagcctcatttctctctgtgctcagctagttggtacaaaacacacgctttgcttttcctgagtagtaaacaatgtctccgaagcagctgaatgcaagctgtcactccgcctcttggcattttcaggtttttcttatttcaggatgcggagctctggtccctgtctgcagcgggagttcagcccttggttagtttccgtttccaaggcaactgaccagcccaacaaagccactggcggcgcggcgccggtgcgctggtcccggggccaccgagccatcactgccgcgcgtcatgcttcctcgggaccttcctggtgacctctcgggtcttcgagtgatctgcgggttacttcatgcgtggctctctctctgtgtaagagtgataacgaggaagctgataattccgtcaggcccgactttatccggctgccacttctggcctctgctacagtagacaggacgaatgcgttttctctcattcacgccctttctcgcagcctctccatctcgctcacttcccttctctctctctctccctctccctctctctctctctctctctttttctctctctctctcaagctctcctcctcccgttctcctctgacagtagccttcttaatgtagtttaatggctttacaaagacagccaggcagccgagcacttctcagtggctgtggtcggaccatgacctagctgaccatgaacttggaagggcttgaaatgatagcagttctgatcgtcattgtgctttttgttaaattattggaacagtttgggctgattgaagcaggtttagaaggtaagggagtgctttttagtgacttctaaaaattctctgttttgcaataaaaatttcttaagcgaatgtaagaggcacctgaaatgagatcagagaaatgttactctggggtggacatgaagagaggcaggtttttcagggtaggattaataaaataaacttttttgtaagtttcagtaatgttttcacagcaacagaacgttaaaactatgagaaacactttgaatcaaaatgttagaagcaaaactgaggaaatttaaggtttataattgatatgtctgcttatgttaagagcatttagtccatattgatgttagattgttttacctaatagccccttttttattgtatcagcaaattttatttggatatattgggtatggatatattgtgaggtccacttcttgctatgtgattgcattcatcaaatggaaatgcatatacatttatcataatttcttatggtttaagattggagcctaaggacgacaagctttttataaggttgtgctgagaaatatttgtagtattacctgttttacattccaacggagagtctgagacagagtccccaaatcatgacagatcttaacatagagcccaaatagccaattgttttccaagtgttgctgtttacgttcatcagaggctcattctcctatcctccttagcagtcatctctttctttaaaaaataaggtgtgttcttgcccatatcttttcctgaattaaatgtttatttgagaatctgagtaaatttggattattattttcttacggctcagaacacgttggagagcctgtttgcatacagccggttattgtttctctaaagttgtcagagcaatttttgaaagcatccctaggtggtaattgacacagttatgctttgatattcttctggcttcaaattttaaacttgagtaaaaatgcaaatgtgttataaatgtgtttacatccacaaccaatccagtcctctggacaatgactgccacatgtgacataaataagattgcatttacaaatagcaaacatcaaattacagtaagtgtgtcactctgatgtaggttatcagaaacctacatttataactcattgtgggctggggggatggtggaaagcaaggtttgttaaagtgattttaaagtttgcagaatgcttttggctgccctttgtgatggaaacgtgtacttctaaaaagatgataaattctaaattctggaagcggtgactgctctttataattgtctttatcttgtgcattgtcatgaaaccaataacttggtttggcttctctattcattagtgagtgtgattttacctggcagatgtgaccctcccctgcccccatattattgccctggtatttattgtctctgagactgacagttacatggagtaccgttgatactcttagcatgttgaaggacttgttttccctgatttcatggatgatgtgtggtcattctgaaaactctttcgttgagggctttctctctggatttgtgatgaaacctgttctgtactggttttatttcacaagcacgaatgttcactctcccagatgagaacttgtgtttccttcttctaagggctgctaacctttgtgaaactattattttcccttttccttattacttatattcaaaactgtgctgatttgtctgaacagtttctttcttgtattttctactttacaatatcggcattttccaggccaacattgtaataatactatggagagaatgtactctctcataaacttcaatatagatccatatctgattcccaatgttttctgcaagtatttttaaatggtaaaatattgacaaccatgttaaggaggaattatatttaatgtgtaaaagttgatagagacagagcaatagtgctttcattctgaagtttgtgtaagacttatcttcagagtgaatgctagagtcagaaaaccttcaaaacaaggtttaagttggttgcgttctttgcttactggagattaatagactgaaatgttatatgtcattgtatatagtttgaatatgtagttcagaatgtgcacactctaaagttacagactaattttaattaattaaaaagataagcaacatttcatatcaaaatagcatcttcatagattccttgaagctttcttaaaaacaaacactgatgctcatttcattcagatttattttcacataggagctcccctctacccccatcattttacatatctcagttggggataacgattactttcaccttatttctgtctgctcaagtgtcctagtaaagaaatttgagtcttaaggagaaaaactgaacctaggttaaaatcctatgaggatgactttgaatttttttactgaacaattaaacatttttatccaaacttgtaactgttttacactgtagtcatcattcagaatgtagtttttctttttgtattactgtagatgcaatatgcattatgttctcaagggcatttataatgctatgtttgcataatgtagtaattatcttgccttaaatatgtatagaataaatgtacttcaaaataaattggtaacattaaaggctgaaatatttgcatttgcttatctttgagtaatttgagcttctattctttgcagaagattgggggctgggtcctggagtcctgggtctttctgttctagtctatgtatgatatgcataaaaacataacactacatatagatccatggcatatatttaaaaatgaaaagagttgcatttatcaggtgacattctttaaaatgagaagatagaataatggtaaaagtacagattcttacccctcctgtgccactattttgttttctaaccttgaataagccactctacctctttggttgtctaaaatgagaaaactggatttgataatctccatggaagtttccatttcaaaatttctatgagtttatcaggtgattaaaatttgatcatttatataacacatattcttccttgtgatataggtatcaatggcctagtttggaattgatatgcagtgcagctcttagactaatctttcctcttcttccatagtgggataattcatcatacctcagggagattttcattgtatttcaggagaatagaaaatgtcctttcctgtagctctagaatttgacattcagagctgctattttaggcatccttgtgatatagtttctcaaaacttacgtggacttccaataacaaataagcacattgtgttaaaatttattaacattttgaagttcagttgtctttgtattttggtgcgatttttttctgtaattcagttaaacttctataagttttctttctaaggaaagtaatcttaatatcaggtcagtatgcatgcaaataatagttttaacttgagcaaagttttgaggataatgcacaatgctagtgttttgaattaataggctctttctacttggtgaggagtttaggaaactccagagttatgctcacagtaaattgcctcttttctagctataaaaatgaaagtggttttctgttaacgcattccagggagaaattgaatcaaaaatttaatggcgaagctatttcattatctctatatgcaacactgggctgtgaaaatatctacttttcaaccaaatatgtattaaatcattctgaagtagttactgaattaagaaagaatcatccttttccctactaccaacttttgtagaaagcaaaattttacaaaattgcaataacgcacatgacttgaaaaactttgcttttgttggtaattgtctttgataaaaagacaaaaggaaatcaactgataatataagtcctttgtagaataacattagaatttcctttgtatttattcagctcactttatttagcagatatctgtaatactgtaataagcttccccaagtggtctaaacaaagtgttagctgtatatacaaagatggacttttggaacccaagttcttaattcacctatgcttttgacagaaaatgtggatgtgttgggtctgtcaataaattgggccatctggtaagcagtgctgactgtgtgaccattccatgatgtttaatgaggaccaaggggctggagatgactggaagggggctattattttcatctcaaatagcttaattgagattcataaagcaaactctcttttaatcctcctagacttctgcttcaccaattgcaatgggatgccaaagctgatgtgtatttggactattagaaaagtctttctaaactgtaatgcttaagaaagataaaataatatatggtgatattagaaaacttaagcatactatccttttacaccatctaggaatgtaataaagggaatgcttataccatctgactttttacgagtcctttatagttaatatttcctttacttcagtaacaataatgtctaaaaagggactattggaagaagagaatttaatatgttcagagattacattcagaggatctggagttattttgcttggatcctaatcacagttttgccccttaatactcatgtaatttggggctattacttggcctctataattcttattttttatccttaaagtggaataatgatacataatattagtatcttgctttgtgaggattacctataaaccaggaaagtgtcaaacaacacaggatagcgttaaactgtttattaaagtgttaaacagagtatagcattagtattaatattggtaggagtatggtaatgtcttatttaatcttcaccatggtcctctgaggtaagtactataattctcagtttagagatgagaaaacttatacctgaaaggactaaataacttgtttccaagttactcaaccagtaagtcttaaagctggaattcaaactcacatcatcaggctctatatcctactctataattttaattttctagatcttacagcatgatggtaatggcaaataatttggtgaagaggaaaaaatgttaggtgaagtatccattaactctttctacagacctttcttgaacacattctatatgtgaaatactcttaatcactaagattgtttaataagcataagtgttcatgctggcaaactgactatactgttttaactatagcacaaagaatattgtaacccctgtatcttataagttagagaaaattctgtcacataaatgaatctgcattaaattccagtcaaatcaagtgcagtctttagttgggctctggggtaaaagatgagaagaaggtagatatacatgttcattctcaaactgagcttggtttctatctagtttatctgtgggtgacaggtgggactgctggaaatagaggggatagagaagggctggtgattttggagaaaggagaaaattcagcataagattctactatggaaaaatgagaccctgaatccaggaagggtctgagatttatggggaggattgattgaagcatggacaaacaaaggtaatcagctgatccatattggagtaggattttggactaagtacatccagcattgatttagagaatagcgcaagcctcaatgggattttaagcttgatcagaatgatcatcaacagaaaacacatacttcagcctttatcaacaggtataaagcatgaaggaacacagataattctagttatagagaatggagtacaaaggaaggaagaaagctcatcttagttgagaatcccctatagggcaaacaagaggaaaacagtgttacgtatgccatgcactggaattatcatatctacgatgcaagattgtaggtgttatttttgttttgcagatggataaactggagattcagagagatttataatttgcttaaggtcacaggggaatgaatgaaggaatctggattagttccaatatcttcatagtggcactgatctgaatggcattcaccatgactacagaagataaatgttcaaaagtagggtaaaaggtacacagacagataagtaccgtatttatataaaccttcctacagactatgcctataaaaatgtttaaaaagttgtttttgtaaaaaattaactatttttttttttttacctctagctctttgtagaggcattctgtgtaaaaacacagttatgataatgaacccaaaaaaagtgaggaagaagaaagaagaaggaaagatagatctggaaatcacataattgaagctctgacttactaaggcttcataaaatgggaaatccttcagaaattaccaatttcaaatcaatcatttcacagagaaagaaactgagtcccagagagattaaatgacttgtttttgacagatctcttctctgcagagaaaaaatctagtagattatacccagaaaataaacttcaaacttaatccagattccacaaagtatttatccaaattgaatctcctctaaattattctgctagcagaccaatcactaaagttcaaggattctaagacttgggtgatggtaagttgctttctggcatagctttaacatcagagatggggctgcgacaaagaatgcttaggctgagaaacttggccataaattgaggtgttttccacctcgatgacttgtctaaataagttagtggtagagagtcattaccacctgacagccaatcggtagtccactggatgaatttctggaaggcctaagttcaatatccaatagatacatatacaaatcataaaggcagttatcttcattgttcatcactctggttattaaaagcaggaagctaaatctctcaccagctcactgcttacaccctctcacagaggtctactctgacctcttctcttgaaatcctaccccctccccaatccagactgttggaggcaattatttggaaagcatttgaacaggtcaggagattcgtgattaagatgaatcttgcggctgaaacaataccagtggtttgtttcagttcttatagagaaaccatagactatagatgcaaagagcacagactctgaagcccaagtaattggcttaagtaataattaaatctcagctctaatccacattagtttttccttgggtaagcagcctaaccttctggacctcagtttctccatatcttaagtgggaataatcatatcacctccctctcctatttgttgtgtaggttggcctgagttagtattgtgtgtgcttagaatcctacctaggatatcataaacgatttgcgtgttttgccattatagccaggcatcatcttctttctttccaaagaaaggagtccaccactcaatatctgaaaccaaaagctgaactcattgctcgctaagacgtgagacctgcacttgtaggagacagtcactcagagaaaaacattgttgatgttatatggggttttaggctttccaaaagtgggaaattgtcattgattgggtttaaaagcagttctggtgttacttgttattataatcaaaaaacaattattcctttcctttcttggaactacagtgcaggaactttttattttcctgataaacaatatttaggactatttattgaataactcccaagtgccagcccccattctagacactggggatcagcctcaagcaaagagacagaacttttattcttgtaagctgatctgctaaattttgagatacaaactataaatgctgcaaaaatgtatgggagatagaatagttatagtagaattcattcattcctttgctcattcattcattcactaaatatgtgtgcctctgataggctccacttgttctaggcaaggtaatgagcacaatccaagtccttgtgaaatttacatacttttggggaaggaagacaaaaagataaacagacaaaggaatatatagtctgatatttaatagacacaaacacaaaatatagtaaggggacagaaataggggtgttatttataagaaagtggtcagagaaggcctttctgaagatctgatttttctgccaatacttgaaagaaatgagtgtgcgagacatagtaaagtctggaacaagaggattcgaggcaaagggatgaccaagtacaagagcctttggctagtagtgtgtttcttgtatacaaggagcacaggaaggccaggggaactggaacagagtgggctagtgagggtagtgaaagcagtggagggatggccaaggtcacatcatacaagaccattgcaaggcatttgggttttattctttgtttactgggaagccactgaaagattaggatgggaaatctccatcagtccctaagtccagcttcttttagaggccttgatataaattttcatacgatatctgtctaccccaatcacagcatagggtaggcagacacctctttgccctgccgcagacacctgcaggacactgattcataatattttgtcagatctctattatctggaaaaacatttacttccatgactgatctttagcatatgctcaggctaaaatattcatttctctttgtaaatctagatctgcccttctaccagctgcagggggagggcaagcaggtctagtcttcatttctcctttccaggcttcttcaagatcctgggacataaactgtctcttaattgcattataggaccaatttaaattgtcttaataagactttacgagaggaggcattttagaaaatcaaataatgctctttgagcacctgccgtactgagagtattatgacagtggaggcaaaaatgtgaatttcacaaaaaggaaagccatgttgttttttttaaagtaactcctcctcccccacatattagcttcaaagacaagtattcaaattgggaacatttcagattgagatgagaataatacatttgtatcccagatatttgtactaataacattttttgggaactagcaaggattgtagagactgtagtccaatagtccaaccccctcatttcatgagtaaattgaggcccaggaaggttaatttacctggtagaaataacaaaactaattggcagcattagatatcataataagtgcatcatctatgatagaatgataaattatattctcggtgaggagctaataattttacgtatttatggtatctaatttttacaaaacctgtaagaataatctcattagccataatcacaggaattctggctctttatttacttaagaatatgttaggaacctttttttcatcacattgctattttctaatcttattggattatgcccaggaagatgggggaattttctggtgcacaggcagaaataaggctcctgaaaaaaactggtgaggtatgccaaaatgtgatccataataatgaagacaaagggtcaaatcccaaatgcctgatgctcaggcattcaggcaggcatcaacggaatacaagagtgggacctcaagtagggaggtcccagagctggtgagcaagaagatagcatcagatgctaataatatcaataacacctgaataagtcctttgttgagcatatgctgggcactatggccagcacttaatatgcattattcgtgtagacacaatttttataaaccagttatataactgaagatttaacaaaggcgaaagtctatgctctggaagtttcaatcgcttgcctaagatcactcacttagaagtggtccagctgagattcatccctgctgtcgctctagagagcacaggttctcagccatcatatgcctgcctctcaggcagggctaagtcatgggcagagacagaattatcttgaagtaaatgaagcttaagctacagagtcactcaagtatgtggcctcttccttttcacattgtaaataaatattaacgtccatctaaattttatatatgtgatttttttactcctttcttgcagactctcctcctccaaattatcaggccccgcaaaaccaagatctgactgtatgtgagcttagaaaattttgccttttatagcatcatgaaagctcatgcctggggacacagaaagcaagatccattctccaagacaggaagctggatatgaagttcctattgggggtccctatgtctctctccctatctccatggcgacccagacttcatactgacacaatgaggatgagatcatttggaagcatgatatttgcagggcttcctgactctggagggaatgctgtcatattccccacagaattgactcagggactatttgggcttggacctgcaggaaggtcccaggggccaactggcagcacagctgagtggagtgagcatgaattttcacatcagacagacgtaggtttgaatcctacctccctcacttaccagctggccttcggcaacttacttgatctctttgagcctcagtttcatgatacgtaaactggtcattgttgtgaagactaacagagatggatggacaatgcttggctttgttagtgtattttataaatgtggccattaatcgttaaagtgtaaaagccaggtgggacaaacagtgaggaaatgaagcaaggataagtgttgtctattatttatttttcatttgttttacatgtgattgtctagctatatgctacaaatttggagcaccaccctagaaatctgtgtgttaatactcgtcctcctttcatttagagcagatggatactttcatgctcataggtatttcattcgtttttcactcatttaagtgtatttaccaagctcttactggatgctcttttaggggctggggagatgacagggatgaaaactttgaggtccctgctgctgtagaggagttggccttggttgcagcagagactctctttccctgtattatatgctaaggaaggcagagaatatgggtgtaggcattgatacattcataatgggaagttgagagacattgtgtctgatttctttcctctgttaatatgaaacagggtgaggtgaaaagcatttgtaaggtggggagtaatggatgttttaaggagagagaaagtacagggtagtcttttcagatcctggggaagtgaatctgtcgtgcaaatgtgagaagattgcagggcaatgcttaggttccatttgagatctgtggtcataattttaaaaggagacttggataaagtatgcactttcttgggtacattactgtgagatcattctttccagacatgttcaaagagaaaaggcagaattgggtagcaaatggaagaatgggaaaaatagtgatggaattagagagaatatatttaatacagtcttcatgcaaaaacagatgtagtggctcagactatggaggtacgactacagaaaacttgaaattgaaccagctggggattatgtcctctaattgtgtgattgattgtgtgatgacacagaagccagtgactgaaaatttcattctcaattgtgtggccataatggtgtactataaacaaaaataactagtgaaattgttcagggaggggatccaacaaggtgtttacaaagactagtttatttgttatggtgaaaatgcttgagaaaatgctctgactgctcttccaacaacagacgaattccttgaagtagtgtttgcactgttccttcataacgggagtgaaattggaatacactgagaggagttttctgcttctgttctaagtttcaaaaataaagctttattcatcagatatttttaatgatgatacatttgtacgtttcttgtttctgcaacttttagccaccagtctcttattaccttttggaaagttctatatccagtagtcacagatctgatgccctacttttataaatgcgtttaatgaggcatataattctgtatgtttgtgtacatacagacttgagcacaagtatgtgtttgtgtaaatatacggtagactcatggatgcacacgcatacacacctcacacacaaacacatattccaagaacataagccatgaagtttatcagttaatatgataagccattgagctcattaaagaatctgattcccgattcctttgtattaagacctttgaagattccttgggagatggatttatatttaaccatatggacaaatacagaggagaagagaggcatagtgagaagaggacagtagagagaacgaagcttgcctgtagggtgaaatggaacatgctactgcctttagaatataaaaaccctgagcgggatctctactctaactagctatatgatcataggcaagttgtttaaactccttgatcctctatttcttctctaaaatcctccactggacagagctcacaaactattgtccgaaaagaatacatatataatgacatcaagtgcttagactgactggttctggtccctagtcagtgcccaggtgggtgttctcacctctgcctgattcctactcaccaggtcctgcacctccctacttgagtttggaaaagccctgacttgtcatttcctggctgcctctctgggtcccaacctgctgcccttcctaagcttgggttcctccctcacctgatcagtgtcatctcccttggccatgcttcagttctgaattcagtcagcttgggcaggagccctaattcatctgcatgttgatgaattcccccatttacccagcatacatcccaggagactggcaaataccgctgtgctgaaaagatgttcagaatctatttcttaaggtaaaagcgcaagtttcaaaacagtatgcaaaataatgatcccatttcaaaagtgcacacaatgtggaaggagaacaaacattgacatttttcatttcttctttgaacttgcccattttgggcatgtatttgtataactttttagaggttatttttaaaaggaaaagaatatcaatatgaaatgcacgttattttttttccaataggagatacgcagtgcccattggaacatagtcatttatcaatttaaaacaaaaaacattttttgatctagaaaacaaatttaaaattgaggagttacatgtttttttttatttttaaaaatagcataattcagaagaaacatctcggaactaaggacagatgttcatagcttgaagtcatttttcaacttcaagttgagcagtttctacaatggttgataaacagctgtctctataaatattcttatgtcaaggaagttatcaggggcccaggatattgatattttgcctaagagcctcacttacctaaaagaggagctcattttctgcaccttttatgaggaactgtggttttatgactcttagaaataaaccatttcactccattgatgtgttttgctccatttcctctgaaagggaaaattggactgggtgtgtgatatgtgagaaagggcggggctgggagggagagtgaagagggagagtttgctgcttcttgtcaattcttggctttcctttctctgagcttcggtaatgttctttctcaaacagcagctgctggtgtctgagtgggcaccattcatgcgaaagtctaggtaagaattatttcttatggggaacagattaaaaggaaaggagtgattgaaagaggcttcaagaagtacagggaaatgtttaagaccagtgcaaagtttccgttaaatggctcgctaggaaggaattctaaatacctctcacacttttttttctttcaaaagtactttataaaatttggccatagggatgatccacataattttcctttttcattactagaattttttttgttgaataatgaatgtgaagaagactaggttgaccttgattcaaattgatgcaatttggggtagggaaaaaacctattttgaggctctggactatgatctgggaatgcaaagtactaagatctgatctgcactttgataggacttaagtccaaaaacaactccctcaaaatgttagcatcatggaaagaacacagcgttgtgttcaaatagtcttgcattttcatccagactaagccaccagctagttatctgatcttagttttccttctctaacaagtgggaataagagcaacctcatagcattcctatgaagaataaggagctattatatgacaacatcaagtgcagtagcccgcagagagggggcactcaattagtccttgttactcattggatccaagatggtccgatggagtcaggagcatgcactctggagtctgatggcctgaatttgaaccctagcccaggcacttacctactttgtaatcttggatacaccgcttatcctttctgtgcctcagtttcctcgtcaataaaaaagaaataatatcattgttattgctatcatagagtattgatatcatagagtttcgaggataaatgagttagaatatgtaaagttcctgcgctgcctggttccaggtaagcactatgcaagtatttgctcttattatttttaataatcattgattctttttcaaaatcttctctaagtgattagtctattttttgtctttcttaaaaataaattttttttgttacagagatagcggcttctatttgagtttaaacctctttcattctacgttgttttgtgtgtgttttgcctatagcctaaacacagacctgtgcatagttaaagtttcacagaaaaacaggcaggttacgggtccagttaacaccttggggggtagctgtgcagtgagccagcgctgagttcccagtaccacctaggctggtcatcgtggagacattcatgtgcctctggtgaccaggaaggcctcaggaaaggctgggcacaagtcaacacgaatcctgccactgagagaacaaatttagcttcaggtagtcaaacatctttcctgttcaataaaccaagcatcttttctcaggcagaaagtgtttctaagtcgtgcttatattccctgcagcagtacttaatagatattcaacaatttgctgtgaataatgtggtcagacaaatgactataaaataatattatttttacagtttttttattctaaaatatttttattctaaaatattttaatattatatatagatctgatctatatctatatcagtctctctctctctacatatatttctcaataacgaaaactcaaaaggaggggaagataggagtggaaagttaaagaagggaaggaggagcccttatgagtctttacacagactacagaaagcctccctttccaaaataggtttaaacgagggccataagcagtgtgaaattagtagaaaaccatttggcgccaggttctgccacacacttgcgtgggcaagtcactaatagggcttttgagaagtaaactaacctacccctgcacaggttcctcatctgtcacatggagatgatgtctgtctcaggaggttgttgtgatgattaaatgaattaatatataccaggcactgagaaaggtacctggccttacataactctgtttattattgctttattattataatactcatcagtcatgacacgaatattttcctgtatttgcctttacatagtggttataagagatatgcaacttcagtacctatgtattttcatatgtttataaatacattataataggaatacacattgtattattagtattactataatagtgttatcttgattaatataaatgatactttgttttttcttttacaaattaaagccacctcataaaatttcaggcaatgcagaagtctgtgaaataacaacttaagccctttagctctctagtctctcttctctcctgttggaaagttctcctggagtcacagtagtttctaaagtgttttcagtagagtttgaaggtcaggcaggaaaaggcctccatggtcatggaattttggaattttggaaatattgtactgtaaggccctcttggaaactcagaatatacttggacatattaaaaaggttgagaagtcttgttgtaaacacatggcctgctttgctgaacctacacaatgcttgcctcctattaacatccaacagaacatatgttatcttaaagtataggcagcatgaaagagtggaaagagcataaacatctgggtcaaaaagatctggattcaaatccatgctctgtcccttagtaaatctgtgttattatttttcttttctttttctcttcaatttctttgtctcggttttctcgtcagcaaaataaggataatagtttatctgcaaagattcattgtgcaaattaaataatggacgaaaagtgtaaacatatgtcacaaatgctacttcattctcctctttccaatgaatggaaagaaatttacagagaggtttctgacagccctcagaaatccctagggaaatgtcttgcaaattgctcattgagaagaaatgtttctggctgtggtttaaaataggatatctgatgcctcactctatcccttttcagagaaaatacttccagggacttggtctctccctcatacttcctttaccccaaaacaatataccttatctctccattttgtcactcccgtggcttaaaatgtagccagtttggggtgccatttatcacataatatgctcaagccatgttaattttcccctgctcaactaattattgtgtcattgtaacagggcatggtggccttatcacaggcagacatccagagaagcattttattttctacgtaaaatgcacatacactgtcacccaatcaaacatctatttactagaaatgttctgatctcttggctacttattctaaagttgagagctctgagcctggctttcaaaataggcaaaatcagagagagaaggaagaaaggagaggtatgcgagataagcagaggatgtagaaatccccctacacatctgcatttaaatagaaaagatactgaattgggggaaggacagaaatggatgaacattgtctctaggggctcaggcgagcaattttcatttagtttgtcattccttgtaaacggtgctttgtgttacagcaataagtcatgccatcgttggaatgatgccagctcttttgtgcagtgctggatgggaggcatcatgccatgcttttgttttgtttgtttgtgtcgctgttttttagattgtggtttctgacatcaaattccacttgccaatatgattctatctctgatagaaagaaagttaaagatacgtagtaatttctctgaaattcagcctgactcatttggaacgtgtagtgattggggcactgcctgaactgaggttctgagcaaatctgtattcatagagcatgtaaatgtgttagtctgagaaagatttggagcggggaatatttaagatgctggaagaagtcaactgttttcaagcaacctccaagttcctcagacgctatttaaataatgcatgtaattaaaaattatttttatctattcattaaaagcaagattaaagaagggtgtcaaataggcttgactttattattctagtttaacttaatatttaatttaaaaatagatgctaatggatcgacctaggccataacaggggcgtctgtgcatttgtgtgtgtgcgttggtgcacgttttaagagcaaaagataacaaaatgtgatactgaagaaaaaaggtggggagttaaaagcactcatatagagatcagacttgttggggtttgaatctgagtattctcctaacgacgggtgtgatttgggccaagagctgtagcagaggctgttggtgcctgcccacatctcttggaacccctttcttggtgggtgtgtccattccccagctgtgggtcctcaagaaggttcacacctgtgactttctctggaggcttatcattggataactgcagccaaggtgcctgggactaacccctccccctcccccctcccccacacacagagtagctgggacggtagatatttaagtctttcttgcctcaagccagggcagattctgtctgctcttctatttatcctccagagctccccattgattagactaaagctgcattttcccagaaacatcctggcttctcccccttttgtttcttgcttcctacatctcatttctagtttctcttgaaagcagcacctccatacatcgtgtgcactggaaatctgcctcaggctctgcctctaggccactttgcctaaaacaagtggcttcacttcactgtgtctagtttccttttctggaataatcttcacagaatgagaagcgcccggcaccatcaccagcccaaagtaagtgttcagtaagggcggttgctcctgacgttgctgcctttgctgttactattactggtattccttgaatgagtagctgatgtgttgagatattaaactaccttttaaagttaaataacaacgggtaaatttcagatatccgagcaaccaatttaagagtactcactgctgggcactttcacgtgtttttattaacgttaactttccttaaatagaatctgcttcctatactgaaattcaacaatgtttatttttacttggactacttcagagtagtttgtgtctgcaaaaacttatagtccagtgagtatattagacaaatattcaaatgaatataatacaaagaaagactggaaggcaaatgacaaacgtccaagatacataaaaataatatgatatattctttcaagacagggaaaagccatatttaaattgagacatgaggaaaagaatcttaaagggaggaagaatgggtgaatggatgaatggttcactggcaagctggctggctgactggctacaatttttaataacttttttgaggaataatttatattccacaaaatttacccattttaagtatacaattcagtgaattttagtaaattcatcatgctgtgcaactatcatacccatccagttttagagcatttccattatcccaatgggatcccgcaggcccatttgcagttaacctctactcccaccacagcttcaggcaaccactaacctacgttctctgtgtggcttcaggcaatcactaacctatgttgtctatttgtttttggtttttctttctggctatttcatacaaatgtgttcaaacaatatgtgaacttttgtatctggctttttcatttgacttttgagatttattgatacatcaatcaacttcaataattattttttattgctaagtagtattccattgtatggatatacttcattttgtttaaccattcacttgttgatggacatttggactgtttctccttttggctattttgtgcacaagtctttgagtggaggatagatgtattttcacagctgattatgtgctagcagtgaaggaaatgctttgagtaaggaaaggagatgaaaagtttgtattgtgttcaagaaggaatgactactcatttagcagaagcaaagagcattagggaggcatggaggaatataaaaacaatgaaagcaacaacacaatttgccaacatacgtcaagagaaatatgtatcttccaatatgtaatacctagaaaatatttcatgctcaaaacatgttgtaaaacgctgggtaatacatgcccctccgggagaaaagaacaatgcttattagcattttaaaggttctgataagttctgtagtaaagacatcaatttttaaaatatgtttaaaagcttatctaaatttcgtttaacctggcatttcacatacacaaaaaagaagtcacaatgcagtctgtttttatcagttaacattattatttcctcagtctaatgctctatgcatatactttggttaatgcatatataccaggttctgcctcaaaggccaggtagaaattatgacaaaaactactctatataaaaggaaatgtggacatttctaaaattaatgtagctctttgatttctcacaaacctgtaatttatagttttgttagcgcaaattgcattgtgttagcattccaaatattaaaatggggataataccactctatcccgttcctccaaatttatgttttacagtctgttggtcatatgccattattgcatcaataaattacctttgtgagttcttatcagcatttctaatgaagtaaaaaaatttcagagtgcatcacgtatggttaggtaagtgctgtttcgtgaaactttcaggtgtgtgtgtgtgtgtgtgtgtgtgtgtgtgtgtgtgcgggcacatgagtctgtgtgttgtcctaacttataaacagtgggttacagttaaataaaaaatgaaaatcattactttaaatcatggtttaccaaatttaaggaaagttcatggtagtggaagatgcctttgggtgatgtatggacaatcattactaacattgtgttactagggaggtatttatacctttcctacttctatttcaatcctttgattatagaaatgaggcagtctccttttggggccagtctttaacacatcagaaaacacttgtttatgtctggtctttgcaaagagataacagtcctgagctcagacctaaaatttaaaaacaatgctgtttcattgtatttaatttgtggttacctctttatggcaaaagatacttgtttgcaatttggtagtgatataatatttcctttaaaaataatgtgtttaagtgtaaattaaatgaattactttaagaaaaatagcaatagtataagtgaaatacggatttcgaggtggttatgaataactgaaatttgggaaacacaattctaagctttacctatactgaaaatgtcttttacttaagagaacctccttgatgtttaaaaattttttttttaattctttcatgtctctttggtgatcatattctgttacttgatgatcagccaatctattttagaagttagtcacggaaacaatatgcaatggtctagaagtaagatttgctggtgaaaagggcaggcatgacttgaaaactactcttttatagaattcgtttttcttctttctttgccaaggaatctgcagaaagattgcagcctatgatgaaaggcccatagctgtttccacatctctatctcattagatgcaatcaactcagttagttggcaaagccagggtgtttcacttaatccaatattcagatcaatgggaagttgccatatgtacacagattaccaattttcaaataattagaatgcaataaaaatagacccaattctctcctgatgctgcgtgtaattaatctcttcttgttgaatcacaattgagcacaggatctcagagactcctgagaatatcaattggatttataccatagatgtgcaaagatgccacttaatcaagttgcaatttattgaatgccagataagagtttactttagctcaagtttgtctaccacctgggcctgtcactgttctaaatttgacgctatgtcaaatcagtgtcttaattcagtcccatgtgtgtctcctacatgtttgaaagcatcaacgtactgttactacatcagcaggattaactggtttgtgtttaaaagatagtttaactattaaagagcatataaattgtaccttatagaatcagggagatgatagctatgcattcaggattacaggtgtgtgggctgtgttttctctgttgtgtttagataacttaatgaccagggcattcatgttcccaactcatacttaagcatctgctctatgaggaatcaaaatcaatatggcgcacgtgaacttctcctcctaacttccccaaaagtccttattcacaccacttgtcctgcaccccaggaatagattgttttccaatgttctgactgctttttatgtcaattttaacacttaacaagtcactgagggcaaggactgggtcatatatgtgacccaagtctcactgattgattacaaatactttttgtaagtttttcgagggaatttggccttttggggaagacagtggaggtttggggcagaggaatgttatgatgtggcttgtagtttcaatgagtcactctagcggacgtcttcatagggaaagagacaaggcagaagtaaggaaatcagtttggaggcttttgcagttaccgaagtaagaagtgacggtgccataaacgggggtagtagaagtcacaggtgcttgttttgtacttcgccacgtgcctagtatgtttctgttttcaatatattgtttaataaacatatgatactatattcctgtctgcctaatacctccacacttcccaaactcttgaccttccaataaatataaaaaaggctagtcactgcagatttacaaaatagcctcagtatctaagctgacggacggggaatggggtgcattatgtagttgctgtgttcagcagaatcattcttttgcatcatatgcagttgagtgcatttagattttgagtagcttcattagatatttctttttacataggcaaacaaaaagaatggaatgaatatgcaccacatattctgctaaaagcagcatcaaaaaactctgcaatatttagacaaaactgagtgacttgatgcaggattcagcaatctacttgttagcactatagagaaatgcggaggtcgttttgtgctattcatggccttatcactaatagttcagtttgtgagtgctggaaataattgtgaaatcaactctttgagtattaaaatgctgctttgtaagatgctttctttaacatggaaaagttttctctggacaggtcctcctaatttttgaaatgatggacaggtgatattatgcccattttagggatgaagaatccaaggctcaaatagattacatgacttagccaaggtcacacaatcccaacagtctcaaaatacaaacttgatgccagcagaatcttgtctgttaggtccactgccgtatccccaatgcctagactagtgttgactgaataaatatttgaaaaataaatgactgaatgactgaataaatgaaagtcacagaatcaagattataataaagatccaacttaaaacactagaaagtgtggtaaatataataaaggtgtagtaaatatgctctgcgcatccatactagggaacgactggaaacagtagctaatatgtgtgataatttaaaaattctgtctggtgaaacaataggctgatgccaaatgatcgactttcataatgtaaatctaaagtcaaatatttttatttcatattcactgtcatcaaaatagtacatgaacttaagtaaaataaaattgtacctcaaagcttatgaccctccttcataatagagaaatacacaaataagacaaaaaaaacaaaaaaccaccatttgagactgtctacttctgaattctgctccccaaatgcaacgtctttgaaacttttgactatttcttcaactatggagttatataataaatttattattactcgtattttttgacttttccatttccagtattacctattgtcttcctggtatagaaaatgaagattacattctcttacaacatccctttctctacaactccgtcctttcctccattgtctcaatgttttcattcaacattcaagggcttacattattataatcatggaacatttttcaaagttcttcaacatagcatacaatgattgctttactttttcattttccctggagttaatagaggcttttgtcttttctgttggctaaatttcctatgcacttatgacttcccaatctcaatttcaatctcaaactgtagttctcctcttgttacagataaacgtattctaaaatctctgaaatccatttgtcctcttgagaaatccttccttgaccctctcctcttgctccaatttgcagctgctgttctctaggtctgctgcgtaaacctccttccttcgctctcttagaattccctttgcctctcttttggattgcatcctacgatctcttcttatttgctactccctccagttagcggcgtgtgtcctccattactttctaagaaataaagattttttttttaaactttttattcccaatttaaaaaaatttccgttatatgtgactcataatttatgttggaattctagattggagaatagtttccctccgaattttaaaagtcttcctttttctatcctctagtatcttgttaaaagcccactgtcattcttttaatctacactgtttcttttcgtccctctggaagctgttagcattttagctttatctctagtgttctgaaattctaaatcacgtgcctcagtgaaactttcattgttttgtgccttttgtaggcctttgaaatctgaaaacctaagccttcacttttggggaatcattttgctttatttctttgaagcgtatttctcctccattggttctgctttttcttcctgaaacttttattagttagatattgggtcttctaaattaatcttatgttttactaacttttttctctcttattttccagcacttttttttcatatttctttatgtgatagtctctcatatttattttctctcttccttaatgaattcctttctatgtctgctgacatatgtttttaatttgccaaagttcattcttactctactttcctcttctgcaatggcctcttgttcttgttccaaagtggcgacctttttaaaaattttatctgaggctatagaatatatttttaaaatttattttcttttgctccttgtactgaatgtttcccctgaattccttttattacttgttttggtctctgcctttccctcctgggctgtctatgaatatttcagagtgcgataataacatgctgattgcatcacctgtttgactgagtagaccttgtttataagtagctttcactttaaggtgctcacgtgaaaaaacagccatttgatcagaagatcctgaaatgttcctatctgtgagtcttttctctggggctagagatgatttttccatcatttatcagttagaaattggattaggctggatgaaacagaaatttaactttagttgctgaactatgtaagactctttttccttccctctcaataaaaagcctgaaggcctgatcaagttgcatctttacccacgagcatgcagagcatacggcttttatcacccatagtctcaacgtggttgccctgactccaatttcctgtccatgttccagacaggaaggagaagaaataatgaaggaagaaagattggcacctatattaaaatgaattaatgaataaataattaaataaacattcccagaagtccctagcagacttctttggccaaaactatgtcataaaaccatttctagtttcaaggaagtctgggaagttaaggtttatagctgggccactgtcatcttgaataaaatcaagcttctatagaaaggaataagggagggtggatattgaataggaaaactagcagtgttagatacataaaataaaataaataaagcacatcattcaaggtcaaggtaaagagcttcaaacccaatgcactgtgcatattattattatcttgggatcagatgatatagaatctgacttaaaggacatgggtgccttcatgtgcctactctaagagtacaattaggaagcactgatccaggcaagactctgtgaggtgttctcgttgctccccagctctccttagagtttgcagactctactataaccacacagtaatctccgtaagtatggtggttgaaacttatttgtaattaaaaatttaagtagtagataaatatttaaatgaacacatggaaatatgacattgctataatatgcctagtttatgattatatttttatgtaaatgataatagattttttatatggaaaatttaaagaggaagggaggaagaagagagagagaaggaaggaatgatggacaggagggagggaggaggaaaattttgaatactagcagccagcatggtttcatttaaaaaaaggaatcttaacatcttcattgccttttgtttaaggactgttagaataaaagttgagggaaatgaaggaaaagagttgatgtaactcctattaaggcagtattctatggtgtctgagtatgtatgcaggctctgacatcactctgcccaggtacaatcccgttgtgctatttcccagctctgtgactttcggcaagttgcttaatagtcttatgtctcagttttctcatctgtaaaatgcagataataataatgtctggctcatacaattgatgtgagaattaaatgagccttatatataaagtatctttggtcagtaagcatttgacaaaagttagctaacttttaaaaaattatggataggataatattgcaatgagatcactcaataaggaattaaacaacattatacaaaaaagggataattcaagtgattatcagctcattaacattcccagtggggaccatcttccctcaggcatattgtttgctagatctgccataacaaagtaccacaaactggatgactcccacagcagacacttattgtctcacacttttggaggctagacgtctgaaatgaaggtgtctgaggggttgttcacttctgagggctctgaggaacgatctgtttcatgcctctctcctagtttctggtagcctcagatgatgcttggcttgcggttggtgttccccctgtgtctttacatcattttccctctatatgtgtctatctctgtgtccaaatgtccccttttaataatgacgtcagtcatattggattagggcccaccctaataacctcatcttaacttgatcgtcagcaaagactttatttccaaataaggtcatatacacaagtactgggggttaggacctcaacatattttgggggtatctaattcaactcataacaggcatgactcagatgaggccatagctcacgtgttttctaaatctacatgcaacccaggtgtcagctgttgcctctagcctttgagacctggatgggattgctctcacggcctgggtaaaccctaggcctcagaatgatacctgtggtctcctgtgacttttgttcccccagctccactgatcccaggctattgcgtcctgctgggctgcgctgtgcctcactgatccaaaggtgaagctcatcatgtcctcgaaaatgatcaagtaacacaaaaaatgtctgtgaccaatgttagctccactgaagctttttgagaggaggaagaatttttaatatacaccatacagttcccaggacaccactcgtgaagtcctactaaaagtgtctgctctccaaagtcttcttcaaaccctagttcttggggggagtttttctcctagtgtattatcactcctagatttccaccagcctcttcccaaagtatccatttcttctctcttctattaggcagagcaatttacttctctctgactcctaggtccaaattttatatacaactccatcaagtaaacacctcccagaaactatgacactttcattaatgagtaatcaggattctagattttttttcttacatagaaattatatgagagaggtaaaaaaaaatgccgtggataacaaaatttaaaaaaattctctacaagtgaatggagtgggagaagggggatgctgggtttgaaaagatgaaatttcacaaggatgcgggaaataataactaagatttagtttatacctactctgtaataagcactcagtgatttttgttgtgtgtgtgagtgagaaatgtgccttcattagtcctcacaagaaccttaactggctcacagtcatgaagttcataagtaacctgggagttatacccagtgactaaaaatccagagactatttaggattgtagggtctcaaaaatacaaagtggaggaggcttggctcatgcacatggaaagcgtttttgctgatgattaagttcctttggaaggaagaatgtgattttactgtcaaaaaacatctaatgggatcttaaactgaataaataaaaatacagtacccaggatacagaagtgatagtccttccctgctttgctttggtcagatctagccatggtcattctgttcatttcttggcactacactctgagagaatctgagaacttaggccaaattgcccctaaccccaagtctatcagttattaactgaacgctaatgggtaagttatgaactatctctggctcttgctttcctcatttatgaaatgagaaaaaacactccctagttcacgaaagtgagaggattaaagtggcacacactgcagtgccaggcacgtagtggttcctcaagaaaggatttctatggatattaatcattctaattgaattaatcaattcattagaattaatcaatttagttgatactgatttagcatcagtgtgtaactcttccattgagctgaactcaattttgaagaaagaatttttaataaaacttttagctttttcacaatgtctaaggattttttccgcttactctgatatttataacatctagttcataacatatctgatggcaatggccaacaatattttaaagaaaccaaattcaatggacagaattgctatttagaatggtggtgagatagagtggctgtgagtggagacccttgagtatgactggttgggttcaaatcacgactctggccttactggttgaggaccttggacaagcccatttaacccctctgtgcctcagtgttcatatctgtaaaatcagattgacctaccttttaagattattatgagaattacatgagtaaatgtgtgtagactagttagagctgtgcctgatgactcagtaaaggcattagtgacccatatttccttccatgtggtttatttgatatttatttatgtttaaatatatttctctcatgactcagggtactgttgatttatgcactaaattttacatttgcttgtgaaagactgttgaaatttttttataaaccacttgcatattttgtatttaacatcttaattcatataatataaaaaatgtattttcatagactatgggtaattggttgatgatctcaaatacataataattataacatgataatagaaagaatacaactgacttttggcagtaaatgtataccaagcactttacattttatttaatccttctaacaactgttatgggttctagggtcttgcccacggctgttaaggactggggtgcaggtccaggtggctccagaccatgcaacctcccagaggaaatgttgaaaagggagcagagggatgagagaagctgcttctgctcagacccttccctgaggccgtcaaactcaaggccttgccttgaggagctcactcagcccccaacctctgtcctgtgcttcttccagctctcctttcagatctggtttattcttatttgagacaacgtttggagaagaaacatgaacatcttttaccttccctggataggaaaaaatacttttcactcgcaggattgttgggctaggataaagacctacttatgaatgttcatttgtaaatgatatgttaattctgtattataatttcagcttggacggaatttttctctggcaccataggatatcatggtcttattatccctcgccctttcttcattgttggtctcctgaagagctgaggagcccatacaacagaactaggtatcactgggacagatgggaggtggttgtgccaaccatccgctgcttcctgaggatgatggtggagggtggctgtgtgctttaatagataactgttttccagggtattgcgttgcccctgttgagttgaatatagtggcaccattcaaaaatgatggggcaaggtcaacagccataaaatcatgctgctcccctgtgcacagagtaggtctaagcactcagcattctgcagagctcatgaaaaatgcccagctccaagttatcttattttcccacaacaaaaggcaaaatggagaaaattaagtagatagaacagagtttgaattctgtcccaaccatgtgtgatttattaaattgtgctggagtgacctgctctgagcccctcttatctatcaaatgagaatagtgagcatgacttctcataggattgttgggagaattgcatgaattcctgtgtttcatttggaccaggcctgtactaagattcttaatcaatgaaggttctgttaacaactttcttaactagaagtatgaacacttgcatgatttgggtgcccatttgttcattctgctctactaggttgaattctgctagtttaggttccctgtttcatacatctgcttatcactgtgatctaatgtggccaatggcatttagtatgggctcaaaaaagtgtccattgtatatagatgccccagtgtgtgaccttctaggatgcagtgtctcataatatgagaaacactgggctggaggtcagaggacttggattatgattatggctttgccaggagccagctttgagagtctggtcggtctgggacattttcctcgccatatctgaaattttctcatatataaggtgaaaaggctgaattagaaatccttagacacgaatacagattcacaagctagaatatcagaatcaatgtgtgcttattaaacataccagttctcgagcttcactctagaccaacaggatctgaatattaacagcaggaaccagattggttagttttctttcaggaattgctccaggtttgagtacaacgagatttggtgatcaatttcttttcatttttgggattataagaatctagattgtcacatttaatttttaagaatttcttgaatgaatcatttgtttaagggaggaaaaaaatcaaattaacaatcttcatagtgatttggaaacaagatcttctcccccttttctagaaatcaaacagaaacgggacatccaagtacagaaacttcagctgagtaaattttttgaggaaataaatttaaaactcttgctgcagtgtttgaatatttggactttatgctcctgagttctgcagatgttgggaacatgtgcttagagagaatagatgtatttgccaagtcattcacagtatttgaggaaataacaatgattttcattggaatcaaagacgttatagttctgtgctattttaagtagggcctattaggagtcccttgtaattgaatttttctattgtagtaaccttttagatatatgaccttccacgttaaagctggaagtgattagtacaagtgttctcaatttcctcttagctctgttggtcttaaaggattctaaattaatttgttaaatgtcatatcccaaagggagaaatagagattcttctctttgtgattatattcctaaactcttccttaaattgttgattgttaactgagacatggtttccccaaagtacacatcttgagaaagcctttaagggtagtttttccttccgtgttcctccttgattggatgtacaatattttaatctctcacccattggcagggtgcttcatggcatgtggaaggttttcacaagtattcttcagtttgattttcacaacatatctgtttcataggacatatattattatgacatttttttttaaatggaagattaaatttgaacaaagttaggtgatttctccaaggtcacatgagacctgcaaggaaaaccttagtctgtttactcttttacccatcatctgtttactctgcaaaaatttactaagtacctcctaacctaccttctaccagaaactatgctatacatttggaattcagatatgaataagacttgcctatgaagaattccagtctaatggagacacacatacacgctcacatgcacatgcacatacatccatacatgcatgcaggtacgcaaacatatatacagtgtagaaaatgcaacaatagaagtatgcacaaggtacagcagtagaatatggaaacaagtgatcaactccccatgtggtttgggtgtagtaggacaaaaagttggaggattggtagcaccttgagatttcagtgtaagtggagcttaggagctctacaatttggatagaaatagatgttacattgtttgtcttaaatctattagaatataatttatgtaagatcaaggaaatgtcaattatcatgtcacagaacatggagtaatggcatcctttctcactgttactgtcaaaagatgactcagattcttggcttgagtgactggttgagtgcaagtggctttccctgagacaggataatacaggaaaaaagtcaggctttctatgggagacatttcagcagtactctttccattgcatcatgctgcttccatgtaacatgctttccattggtaacaatccacaatagaaaagaacttctctagaactagtaggtctgtaagcggactgattaaggaagcatttagggtgtgagggagagaaacttagattacattgatggagtcagagggatcatgtgcttcttagaagaggtcaaagcaatagcgaaaatgtttattcaattatcctgttcaacttttgatgtactatcagtaataactaagagtaacaataaatagtggcaactgtattgtcaacaaagcagcatctcaagaatctgcttgtattgtccttgtcaatgacacaatgaaataagacactgtaatctaaccgtgttattcaaaaggctattgccactaaaatgcttcatctaaataaagctgatcccgttagggaaatatggaagtgagatttgcttagtcttacagtaatggtgctgtagataattgacaattggctctagaggaaaaatcagaagaccttagaattacattagcatatatacccttcatcatcctaatggcacaaaagaagagtctgtataaaatatttatatgtacaagttgccgagtaaaataatgacattaaagtgaaatacaatgaaagcagtgtcatggcatatggtggtatgaattgttgagctgaattaagtaagagttacctgccttaatacttctttccttggtttagccatttttttttttttaaataaagaacattcatttctttaattgctctacaagatgaaggaaatattggaaattattggaaaagagacttcaaaattcacattcaagaggtggtaaaagcggttttaaagagcttcaggcctagattttgctgctccatttttcattctgtaaaatggggattatagtaattctgtctaaaagttgctatgatgatatacttgcatacagaatgctcagcttaagtgaacagaaagcactcaataaatattagctattgtcataatttagtgttgtttctacatatgaataaataataataacccagtctaatatggtatttgtaatatgccagatgctactctcagtgctcttcatgtaatagctcatttgctcttccaatgactctatgcagcgagcactactactatcctgaattataggtgatgaaacaaaggcacagagaggttaaaaaaagatccaaaaatatctgatggaatgaaacccagcagtctgtccttaagtctatgtgtcccaccactatatgataactgccttgagataaattgccggtaatgcagtcaccacaaataataacactatttgactaagaagaggcattttttcatttttctatagtttcgagtaatgacggttcttccaaaaaaataggaaaataagtaaaatgtatggcgtgctgatggagaaagagcataaacaccctttgtgagtgcttctaacagttttccttctctgccttgcctatcctaagagctttttttgattgctaatgatttgctttcccattctcgataaattactgccaaactgcttgacaattcttttcctatactgttttcaccagtcgtttctgtcctattttcttttatcatgagccttttagcaacctgctgctttatttatggaaagattttatttctcccattgatcccaggcttccagtgatgctgcactgctcaaaagcaccacgggccgattcctaggccaagaccactccacgtttatacctcatcctctgcttcctgagaccaaagacaggaagttcccctctaggcttctccttttgactccatcagttctttggacaatgttagtatagttgcttccaagagctatttataagcaccagcaccctgcaaatcataaataacacatgttaagaaggcagatgaacacaagttgtatgagtaatgccacatcttctaaaattctatgtctcaaagaatgaatcaattcttttgactgactaccaacagcttttgctttgtctagacgggaagctcaatatttagaaataagaagcaattatttcctatctgattgtctccattccacctggaaagacaagacaagagcagaataggagctcatcagatgtctccgattcatctgatctatcaaagcttgaatgcaatgtgatatcgtgaatcttctaaagactataagtcttcagtgtctgaccaggcctgtctgacactgctgcagaaaaaactccacaaaaacaacttttagttaattactcccatatgcctcagctttcatatattaaaatcagatggccagattaaaacactggttcccaaaccgtattcctgggaggcaccagttcttcaagctaaatcaacatgcttcactttatcccgaattgaataatgcagccatttcccattgtgcagggaaaaaaatacatggatagagctttcacaattttaagagttcttctataatctatccttaaagtattgatgtctgctggaaagttctggaagaagataaattgagcaaatagcaaacgcctattagtggagaaaccaagaatgagtggttgtcgtattttgatggctttgaatttcttcctgtaaacaaataattattatatgtgaaatactcttgctctctgcaattaaaattgaccttggtacatttgatagaattaaatttgtgaatattttaaactgttatactatcaatagcatggtttctaagggctctgtcatctaaacacttttgagttgctactctcccatcagcaaaaagtcacatctcaggtctctaagtgtgggtgtgtacatcagcaacacttgtgggttctgcagaattgctgttccttggaggatgagagtgggtccattggctgggccctcagaccttcttcaaccaaagcagcaccactctcatccttttcatatttgacattttggatttctgtttaagtactaatttggtcaaaaaaacccattactagaaaaaattgagaaccactgctccacatagtgtttaagatcactcagagcttgaaaaatctttgaacctatgacactccttggtggccaaactatgtaactggagcatgaaaagctccacatccatgttcccagcccaacacacctgatttaattgttgagtgaggcactcaacacaataaatgcaaataagctttgctcaaaaacagaagagtaacaaggcagcactaaggtgcattcagtttagcatcttttcccaaactgtttctttgtaggtcacatccaaaaccaagaacaattctgaaagtcaggaagccattggaggtagtgttcaatttgagctctgacccctagagtcccagtttttttccatgtagcccccatctttttttctccttcaaattttgagctgtctgtcttctctttttttcttgcaaattgttgattcagtttacatgagtcataaccatgttcaccaagttcactctaaaaagaagatggaaatgaaagaggcagtgaaaaacttatagatggattcactggatttgtccagacagagaagtccccattgcctttactcgtgatgttatctagtcagtcaccaaattctctctcttaaatatcccaattatgttttgatccattacatcttttctgtctcttctatcactagaaagccatgtttcacttggatcattcaggcaacctcctaagatgtttccccaccttctccttagcagccttccagtctttcttcctcactgtagccaagttatgattatggtactcttctctataaaccatggccaggctcttcaacagggcatacaaggcccctgctcattgctctggtttaacctctcgatgcaccatcttgtgaactcaactttccatccatactgaaatatttataggtccttaatcaagacaaagtctacctctactcagacatttgcaaatgctgttcctcctgcctgatagacacccttcaccatgcctcccccatcttccctgagtcaaccctcttcatttttcacatcttagctttagccatgacttttgcccaggaagccctcactggattgccaatcccaggactggagtagatgattcttgggtgtactccaaagaatcaaatcaaatatacaaaacctgttggatatttgaactaaggcacccaaaattatctccatcacaactcttagcacactggacttcaatcacctacttcctattcaaatgcctccacctgactgtaaagcccttggggtcagggactattgtatcttgtacattctcttatctcccgcctgcccagcccaaccccatgcctaaaacactgcctgacataagataagtgtaaagaaaatattggtgaatgagttgctccttagttcaaatatccaacaggctcaaagaccatgtgtaaaacacatgttcttcttctccttgattgaagcagaggccaacccatgtctataacttcctgttctcccctgcctacctcaagacaaagtcaagctcattcatttagaactttcagtgatctgagacctccaaattaattttatggaaaagtaatgtctaattagtgaaagaaaacatagcagtattggtgttaaagtaagaaaacattagaatgggaaaccgcatccgtatacaaacattcgtaaacattgagagcactgtgtttgatgttaaaggcctctgtgtttcactgggtcccattaaaagatcagtaaaacctgtttatgtgaagccagagactctgttttcatctaaaaacattattatgcaaatagtcatttcaaaatacacactgagacttgaatatttattcagtcagtttaagaaaactctgccgttgaaattccagaaaatgtaaatatagagaaagatagatacatgaaaagtccaattcattaaaagtgaccttttaaaatgtgttgtaaaactcagctgcaggattgttatgttgaacacaggatagatagcgtaagaataactccagaagagatttttaaaatccaccttttccatccagggcctcagattagtcatacctagggctatgacattatcctcacgagagaactaaaaggcagcttaatgcactcttcaatgaaaaacaaattcaattaaaagtacacataaaacagtaggaaaccgccactatgaatattaccctagctgggcaaaatcaataatacaaaatttttgagtcagtcgtatttggaaaaaaatgactaaacttgagacaatatccatcattttcatcatcaccatatcatcctttctacaatggtaatagttgaactagtcactttgcctatatcatctcatttaatcttgtgcctagcctgcattgtgatagctgtcatccccattttacagacaaggaaactgaggctgagagagactatgtgacttgcctaacatcttgccagtggttaagggattcagattccatcctggctgactctggatcatccaagttgtcaccacggcattataactctttgtgttaacaaagaactgttatcaaattgtcagtctgggtcctcctcaatgtttttcattttgtctgtttgcttggtattctgtttttaagtaataaattgctagtttaagtcagatgctgggcctcaataaaaacatcattatatgaaaacagacggataatttgtgcaaaaatggactgaaataggaaaaacagtgtctttactgtccacagcaagttttgggaagttgcatgttcatttctctaaaaaagatgcctgaattcaaatacatatatgacaagaactgacactacagaggtaatcagtatggcttcctagcattcagaaaggcttgcgttctctgccgcttgatgtccccgtgactttaaacaagtacttaaatctctttaaactcctatttctcatctgtgaaatgagactaataatacctactagatagaattattgaaatgactgactgaggtaatatatgtaattttctaacatagtggaaatgagcaagtgctcaagaaattttaacaattattattacagtcttactgaatgagttcctcaataattatttatagacactatacacaattcttttgccctttcaaatatataattgtttcttcagtttttggggcaacataaaaactagtgacttattccatgtgttcaaaagtcagaaacaaatggtgtgtatttatctgcctttccactcatcaaatgagtgaagactgccagcttttaattggagcactgatctctgattgtgaagactatttttgattgtgcttctatccctttgcttcagaggtcaacacattcactcaaaataagctactaaaatttgatcgttgcaggtaaaattggtttgtcgttgctatgatttcccagaaatctcctttcccgtaatagttcattatttcaggctcttgccactcttgtccagctcattcctgcaacccagtaagtggtttccatgcttctgactccactcaacaaaatccatcctccacactgtggtcagagtgatctttgtaggttgcaaatcggatcataaaattctccttgcttaacgttctctaaaggtacttcactgatgacataaattcaaaactctctttttaccctaagaggctcttcgtgggctgactcctcttcaccaatagtcttgtatctcaccactcctctcttcttactcctttacaaacacacttgggtttatcaagaagcttcttatctccttgtttttccccatgctgttctctctgtctgtctccctctttctcttctctgtacttctctcattggtgaattccaaatcgtctcttaagactcacctgaggtgttacatctctgtgatccttttctggtccttgtagcctaatgccaggctgagttaagtgttccttttccgcatgcccataataccttgtgtctattttgttctagctctgatctctttgctttatttattgcaaaaacttctatggtgcttattatgtgtcaggcactgttccaagcacttcataaatattaactcattcatcttcaggacaactctatgaggtaggtgtagtatttttatcctcattttacacacagagaaactcaggcacagagagattaagtaacacagctagtaaataagaggtagagccagccttcaaattcagtagggagcttcctgagctaagagcttcacttctccattatgttcttaaacattatgctgaccatcgctagtcccacattagttagggaaagacactgtctggtttttattttagtgtatttttttcatatcaagtacatgcttgtgatatctaaatgttggataaatataagtagttaagtacattaataatttagtgctatccctgaatcattccattggctttccatgccttccagactgttgtctccttggaccacgaggtcaaaatttatttcatgcaatgttgggcatcagaacagctcttctaaaaatcccttccactcatactcctccttcgtatctcagagtctccaccattattttggggacatagaaagcaaaaaagttcccttatctttagcatcccttatctttggcagaaagcaggctatgatttgggggtcagacaagcctgtgctagagtactggctctaccaagacagaaagtggtggtggcgttttgaacatcaaggccagctggagctgagtagttgctcaaataagtcttgtcattctaggatttggccctttgcttcatctctgaatcttagttttctcttctcataaacagataatgcattttcctcacaaaggggtctgctagaatttaataaaatgttgtctctgccttagttctatctgggacatagtaaactctcaaaggatagtttcatgttatgattgttacatggacgtcagcatgactgaaagacgctactcttatagtcaagctccatgaaaacctggatcctagtcagaagctacttgatggattccatggaaaccagagaagggacagataattcagcctgaatgaagaggggcattgtggaagcttttgttatttagtcaatcattcattaaacaaatattaattaggcaactactatgagtcaaacactgtgctagtgctggggatgtactagttaaagagaaggttacagtccctgccctcactttgttcacagtccataggagatgtagacaataaacaaatggacaagcaactcaatgtataataacagtttttgacacatgctgtaaagaaaattaatggggtgcattgatggagaatacttggataaaagttggagtagtctcttagctgcttttcccaaagcagatcctaagatgagattttatgtcaatgtgatttattagaaggcacttccagggaaaaatggttgggaagtcggaatagggccaggaaaggagggagggcacccaagagtgcaatgtcagtgggcagctgtggctcaaccctgcatgagagctgtgagggaactgtagttcaacttcagagttgaacctatcatgaatgaagggagctagagcatttatactcctatccatcaggcatcaggtaagactgaactccgaagtggagaggaatataaatcaacaggcacttctaagtctccaagtacagtcaaagccattctggcagccagaaatttgtcctccaacaaagagacacagatactggtagttgggagtgaaagaatactgggagctcatgttcacgaagttgaaagggtaacccaagatgatatgggcagagtaatgacagcatctgctatgggaagtgtcatctaataacacaactttaaaatcaaaacttgaagatgagaaggatccagccttgtgaagaacaggggaatgttttacagaaggaactgtttgtgggaaggcattgagatacgaaagagcatagtgtgcttaaggaattgaaaggatctgtatgttgggagcgggagcgagaaaacaaatgttatgaggtaagactgaggaagtatgcagggtccagaaatgtatagaccacgtaaaggacatattctgactgcaatgagtttccatttgaaggcttcaagccttgtagtgacattatgtgattcgggttgtaggaaaatcttgctgctatcgtatggaatatagattggagcagggggagaagagcagaaggtagactaccattctgtagtttattgttgcagtcgaggtgagaggggatagtagcactaaccagggtggggtgtagtgaagacaggaagaggggaatggaggtaggatgtattgtgaaagtagagctcataggacttgctgatgagttaggtgtatgggtaagacaatggaatgagttgaacataattctctggtttctggatgacgaaactggaaagacagcgtggccatttactaagactggaaagaataaaatccaataaggcaagtcagatggggataatgctaagatcgataaataaccttcaagctttcttccaatgctgtgtttaaatctcagattcttagcgatgttcatgacaaagaagtgtaattggttcggtggaagatggtggatttaacacaggggattcccctttaacgtctattctaatctggctctgaaatagcactgatgaaaccatcctaatagttcatgtgatatgtaagcagatctgcattaaacatcaccttgaacaaatcctttctgaaaaatctttcttttttctctcagcagggggttatacttcaccttttctttttatgtaatatcatttgattccccacttaaaactaagcattgattcaaagccagagtcccttcagtgttttcattgtagctttttttacacattttttccttcatgtttgatgttataatcaagtgttatatggaaacagaaagaatagttcctgcaaaaaataggagcagacaatatcaaacacagtgagctgcaaagttggcagttaaagtctaaaataactgtgggggtgggaaggagctctgccaatggaaacctgttgatattcacgttgatatgataacagctgagaactcaatcaaaaatcatcccctcgcctaaaataatctccctgtaccaagcagttgggctaaggcatagaggcagcgagtaactggctgtagtggccacttgagtacttacctgcttgagcttgagtaagccacagcaccactgcaaaaatcagtctcatccgctgtaaatgaaagagttcggtttatagtagtactgacaaatagattccatgtcatgggcccactcatgtccatcatcagtgattgcttgaagcactatgtagagaagaattctgagaccatttctggattcagtaaaataatgtaccctcaaagataagctcggtctaccatggacatcagaagggagtgtggcagctagaagactctgaagtttatttcaatccccacatccagccgtgtgccttttctcggacactggatcttgtgcatgtaattcaaaaatactaaacaacgttaaacatgtaaaatctctggcttaaattaaggtgttataacagagagcaatctgtgatacccactttatcaatagctgcatgcgttcctctagagaagactttgcctccccagattgggcaaaaaataaaaatataatcttgatctcatagttttaggatagaggcttttcgatataattcagtggtacattaaaaccccagaatgtttcaaatagaattctaagaaagcacagttaggcagagcttttaaagcaagaaaatctttagatggaaagaaaggtgatctgtacacactaacccctattgaaggcaaacctcctggaactaaattcttgacatttagattgtcttggtttaaattatatataattaccctaagtcttttttaatgcttcgtcagttgtaacgaggtctgataagaaataatcaagcagttctgtttcaaatatgttatatacacacatgtgcacatgaacacacacacacacacacacacacacacaggtttggccttctccgtgcactgtgccaaatgtccagtcatcaggatggtattcccacggatagaagtaaaagcaggagattttgtttttaatcagaaagaaccagggcagctgacacccagggtaacagccaagacaagctgcaaagaactgaggctaaaatatagaaaggccaaatgccttatttatttgcacatctcccttccccacttgattctaagaccctttacagaagggactgcttttcttcatgtctatatccatcatacttaaaatgggttggctttgtaataagatttaaacatatgtttttggaaaaaacagagttccatcatcaaaaccatcagccagaggcagaaaatgagatgtggggatgaaaacctgcaacattagaggtgggattaaatggtgtgaacatttaagattgccaacgatcgtaatggaagaagtgcggagtgtttgtgattagcctttaaaccaggaaattgaaagcactttttatttccagccaggtgtatttatgcacatgaccctatggaacatcaatatatacagtcatgcatcgcttaacaacgaggatgtgttctgagaaatgcattgttaggcaatttcgtcgttatgcgaacatagtagagtgtatttaaataaacctagatgtaatagcctactacatacgtaggctacatggtgctaatcatatgggaccgccatcatatatgtggcccattgttgactgaaacattgttatacagcgcatgactgtaattaaaataggcccattacatttgaccatatgaactaaacgagtcttattgcctgaaccattaactctgatgataggcattcaggggtatggtggtcattgttttaaggaggcaggagtggaaaagaggttaataccgtaagttttggagtcagttctgcattcaaatctctgcttaacaactaaataggagtgtgatttgaaaggttatttaaactatttgagctattgtttgaccatttataaagtaagtacaacagcacttccttcatggggtggataaatgttaccatccataaaacatagccaagtgactagaacatagtaagaactcaaaaaatgcttgctcttcttaccattatcagcgttattatttcagtacattactgaacgaatgtaactacagaatgaaattgtactctctcttaggttttaaatgtctgttaagataaaaaccaaacaattgcatcttgggctttctaaactaagctaagtcagacaacgtattttgaaaggacattgaaaatcctacagttgggccggcccggtggcgcagcggttaagttcgcacgttccgcttctcggcggcccggcattcaccggtttggaccacgggtgccgacatggcactgcttggcacgccatgctgtggtaggagtctcagatataaactagaggaagatgggcacgatgttagctcagggccaggcttcctcagcaaaaagtggaggactggcagtagttagctcagggctaatcttcctcaaaaaaaaaaaaaaaatcctacagctttatgcaaacataagaatgtttcattatcatcatgcttctgataggctaaaagcattccaatggagggagagatgtgttttagggtaaaataaggagagacggataacattggcaagaagcaacctcagcgtgatggagatgttgccagttttttgcaatgctcaggtaattcaaaatagaggtcaaaatacagaaacattgaaacacttttaaatgcacaattgacagtgtgagaagagtaaaggcatcaagaattatagaacactatatcaattattctcttaaagtgataaagaagaaattgatagttaataacttcagattataattgatgtcactccccaaaattcctgtgttgctggagagtgggtttggatagtgttgccagatgtgatgagccggttagtgggtctccaattaaagaaaagaggagattgctatattattctgttttatttctctctctctcctttttttttttccttgctacagtgactctgcattatcttggaatctgcagcatctgtttcaggaattattcatgtaggcaatgaatattgagcatctattacataccagatagtaccagagtgttatggggagattgagattgaggcttattcatgccatgtttaccaacaacaaacttttgtctcagccttgcttaaacttgtcatgtgatcatcaataaatcacctaacaggactttgcctaaacctgttcatatgtgctgtggggctagaactcccttctctactatttcatagtccctctgaagctaaaattaaatgacagatgagaaagtgttttgaaatgccaaaattatttttggaacgtcctattgttaccattgctatataatttaaaataacagaaaaatgtttgattccatggacaaactaattaaagaggctaagaatggctgaccaatgcagggagatttgataagaagcaagaaaaaagagaatcagaatagtttgctagtttgaacagttgctctaaaccctccaattactattgaactctttctgatgactgtatctaacactgtcttggaccaatggttctcagacttccatgtgcatcagaatcatgaagagggcttgttaaagttcaggtcgctgcacctctcccccggggtttctgattcacttggtctcaggtgggacctgagaatttgcatttctaataaatttcaggttaagctgatactgccggtctgggaagcacacttggagaagttaaggatgcccttgatcttgcagagcttgcaaaccaaatggggaggcaaagcttgaatgaatgaaaaataaaaattccggccctgagctccagacacatgtatgaaagtgcctactttctaaaggcatctcaaatctaacatgcccacgatggaacccttgctttctacccacaaacctgttcttcttctagtctttcccacttagtttatgacacattctcaacccaagtgcgcaagtcaaaaacttatgagtctatctcagcacccacacccaagccatttactcatttattcaacaaatgtttacttatttagcatccactttatgtcagggactgttctagacgtgggggatcagcattgatgaaaataaagtctaagtgctcaaagaacttaaattctggtatgtaaattacaaaacaccatgtaaataagaatatagaatatagcatatactataaccaaaatatgagcatttcacaccatctccattgccactaccccaatttcagccatcatctcttccctggtctactgagatgaactcataactagtcctcttgcttttactattccccaagcacaatcaattattcatatagttttcagatgatcctttaaagtatgtagcagattatggcattctcctacctaaaacctcttggtgacttttcttcgcaattagtgttaaatccagactcttgaattaacatgggatacaagacctctccaaactttcttacttatctcttcagcattcagaaagctcctgtggttttctttatgcccctctgacatgctaaattcactcaaacctcagggcctttgcacgtgcagtaccctcttcatgtaacactctttctgaatctgaatatctggttttccttgtcatcatttaggtctgagaccaaatatcacccccactgagaagtggtttctgacctcatttctagcacacctcactgccacgactctgttttattatttgttttttccttcatagcatttactgctctctaatattatctagctagctagatggttattattactaaaatgtgagcttcatgatggcagtgacttacacagacttgctcactgctttgtctccagggcctagataagtgcttgccatgtcatagacactcagttaaaattaattgaataaatatgtaaatgagtaaagcactatgattaattgtccaaatttctcttcaaatcactttgaagctccttaacttcaatgaccatatttcatctttacaatgcagtgttgaacccagtgctgtgcatacagaaggtgctcaacaaatgtctgctgaatcaatcaataaaatagatgtttcacttcgttacacctctgtaataatatcgtgaattagatattatttttcatattttaaaggtaaagattctgaggttcaaaaacgtttaagagacttgcttaagtagaagcaaaaaacaagggaaggaaaaaaaaaaaacccaaaacaaaggtagatcatcccagaggctgagggaggggaaagataaagattaaatgccaggtgcacagatgctgagcgggaactgaacattgacaaatggatttggcctgaagatggattttgataactttgaagagagcagcatcaagaggagagtgaaaataaggaggaaagtggaaatgaaaaaataaagaggatgggcagaagagagattgtttaagaagacagaaacaaaactgtttttaaactaagatattactgttacttgaaaatggtgggatttaaacatatttaaacaaaggtgagattactgctggtggagagagaagagttgggagggacatgagtttgtgaaagtgcgcctgcagtgagaaggggtggagtcacagaaaagactgcctctccctctatagttgtgggaaagatgggcagaggcaggagccaggacagaaggcggtacacagggcagtattagaggagctcatcgaagactgactaggtcttgataaaatgtcatgagatcaaggtgagtggtcagcttcccaagaagtcagaaaggcctggaaacttcaagaaaagatcattgaaaatagtggttcattttttgatgagtccaggaatgggtgaaggtgactacctggtgagagtgaatgatcgaagagtacagggcattccggggaccatgttagaagatagagcaatggggaaatgagaggccaggacctacacttggagggaattaggtgcaggtcaaggagtaaagtgtttctgagaaaagtaaaccttagttttgttactagttttacccttctctaaacatgtaatcttgagccagtcattttcttcctctcagccttaatttcctttcctgtgaatgaagattgctatcatttgtgaagatgaaaagaggtaatgtgcactaaacacacagcagaggagctgggtcgtgagaaaatctcaaaaaatgattgacaggtgagagtaagaaaaggtccagatggagtcttagacatcattttaaaacttaattcataagaatcacttgggaaaatgatttgaaaggcgtaaccctgccctatcccaccctctttgagattctgagtctataggtcttcagtggggcctggggatatgcatttgtaacaagcaaaccctctagctgatgctcttataagtgctccctgaggcactctgagaagagccttgagaaatggggtggctattgatggagttgcacaggatggagccaccactgtatagttacagtggtatttgtataatagccatgtttgaccttctagagcagggttcttactcagcaaatccctggaaaactagtcattcatttacatttacagtgttttatatccacctctgctgtctagttccaagactttttcatcatcttaaaaggaaaacctataactgttaagcagctgctctgcatttccccctctccctacaaaccaccaatctgcattctgtctctatgaatttacctattctgattacctcatgtaaatggaatcatacaacatgtgaccttttgtgtctggttcctttcactttgcttaatgtttttgaggttcttccatgatgtagcgtgtttctatccttcattaattccttcatgtttgaataatattctatagtatgcatatatcacaatttgtttatccattcatccatcgatggacatttgagctgtttcctcatttttaccattgtgaatagagctgctatcaacatacgtgtgtggaaactcttaaaacatttctctgcagaagcagcatcctcagggcttttaatttaacttatctggttaaaatcacccctgtgattttaatatggggccagtattgagaatctctgttcaaggtgatgatttgaagaaagatttgagttgctatgtaattttagcattatttagcagggaaattcctttgtaggactgattgaaccttcctatacaggcctgagtacacaggtgacactcagtaatgcagcccggatagctggagaaacagctatgattccagaacaggtcggcatgaacaactggcgtgagtgagtgaatttaccttgtcctgcctcaaatgtggccatggcacatggagtcataaataaccttttggaatgttttctacttttctctcctctgaagattgctttcttgcaatacctaaagggagaggtagggggtaactcatcttatacctgtcggctgagtgacacagctcaatgagccaaaaatgagcctcagagacccctcacagagatctgagaaggggcgtcaggatttgtcaaggctgcatgtgaataacgtccaggtgaaaaagaaaagaaattgctgtggcaattattttaatgaaaaggaacactcagtgtcaggcctatatattatcctatccgtgaaccactcattgatgtctcggaaaggtatgagtgtgtcctttgatgcgaggctttgtacttccgtgaaagcttacttctgaggagctcaaagtgctttccatggactttctcatagttcctttcaacccctttgtggagtggatggcaaatgttattctcatctcccagatgataggaaagctgaaacgcagagaggttaagtggtgcgttcaaggcttatccttcgatctgataggatgggacccaaggttcctagcttccagagtcctcacagttggccctgacaccccctgacctttcatcagaagggtaacatctaatagttactaatatatatatatatatctgccaacagtggaagatggatattttcaacttagtgacttcaactgcctgaattgagttttctgtcagggtcatgattattgattcacagcatgaggaaatttttcactttcatttttttattattatttttgtcagaagtcacacagttgtgataacattgtcagtatttcatcaggtcttcataaggtgccgttcttaggtgatggtgtgaaatggtgtagtttcttagcgcatttcatttcattgtcactggaagcatattgtaaagtaagctcgagcacggggtctacttatgagataagtgagggctgatgatttgagtataaggtaaatattcttttcccccacggcaaaatttttagtaatgttgtcggtttgattgaacagcaccctagtcattaaaccttattctagcacctctacatcatatggggcccacagtgttcttcacacaggacacagatctgaacatcagaactgctgtgtgtattttttgttttatctgttaaattatgaaagtaatagtacgtgcaaataaaaatgacaagaataaaatttagctcataaagaaggctttaagatgaaaagtaaacacctcgttctctgtatcatttccctaaaattttctgggtcatactacaatatgccttattctaacaatatatgttggatagctcttcttgaatccatttcaacaatataaatgtaacatttcatttctattacttacatggtatttcactgtttggctgtataagaattcatttaatcgaatatcccagtgttggacattcaagttgtctctagttcttcaataattatgaaaagctgtaatgaatgaacagccctgtgtatatgcaattttatgtgtcaaaatagagaataaatttgtagctaaggagtttctgtgataaaatgtagctacagtttttatatgtatattttaaaatatgtatatattcataacatatatagatatatatgagtataatatatatgtatagtacatattatatatattcatgtattttaacatgtgccaaaagtatgttgctactttttcttgaggagatttaaaacaaaaataacacaatctctcaagccccagcataaagtacctactggatcagaatctcctagagtgtttgctgaatatcatttttttctttttaaagccaaacaattaattttgaatcacagctcagttaaattctccatcccaaaacataaagatctctttccagtctataatcaatgtaaaaatctaacttttcaagtcataaagactagatctatttttatttgattattactcttggtagagcagaaaggtcagtatcaaattttgggtcctgcacgttgctcctggaaaaccagcgctaaaattcagcaaatagaaggttttttcttcacgggacaggcattttttagtgactggcacttattgaaggattaggtatccactcgagtagaacagtcattgtcgtttttgcagatggaagtttcagagctgaatatggaaagaactgtgctataactctagggaagaagtttcctactgcgtccaacttttcaagcctgtaaaatttctgtttcttatttttgttatgattataagtgattttgtgcagatatgaattttttttttagcagtaatgggatttggaggaagagtatagttgtctgtttgcttttatgaccacctgtggtcttgcagagaaatattccttgaaaataaaaatgcaaaaaacaaataggatgcttcagcctttctgaacagtttactgctccctttatacttttagaaaatgtcttgcttggataagatctcaactaaaagccttaagggatatcaagaaatcaccactctgagctcttccttattaaaaaaatcatagaaaccagctttgtcacaagacacagctctcagttatcaagaagcaattatgcttgtgtagcctaattaaaccactggctatgagcttattgaatatttcaagggaaaaaaattttcatagaaaaatgctgctcaagtttgaacataatccatgtttctggcactgtcagtttttcatgaccaaaatgttgctacagtttgacgcattgtgctgatttgaagaataatcaaatttaaatgaaaatatttgtgcacattgtaaataaacactttcaaataatcctatcatattaatagatttaacttagagaaaaacaaaatatttggggcggggggatcttggtgcaaagaggaaagaaactatcacccaagaagaaatcctagattctttcatatttctctgtcaagagtgaggacacaaattcaagaatttcaggatgcctgtagttttcatgactaagaccaagcagccagctactgttgttctctactactgtgcccaggttctatgccagcacagaaacaagttcatgttcaagcgccacaatttattagacaagctaatcttcgacaagtcacataatgtctccgtagttcaacttcgttgtctgtcttcattgtaaaattctcttacaaggttgctaaaagggttaattattattggacatgaaatcacttgacacagtgtctaatacacaggaagcattcatcatcatcctcatcaattggatgcatccctggggccactgtggacggacaatccctaagagaattgtcctcagcctctgtacttcgaaagtcccttatgagcagagaatcaataataggaagagaaaagggaagaagtgatatttgtgggctactctgttctaaatactctgctaggtacttgatatacattatttcatttaatcttttcaccaatcttacaaagtcaagaaaacaaggcttaaaatggctatttcttgccaaagttcacaaattagaagggcatcaagtatttgaaatttagttagtttggctgcaaggttggaaggaaagagactcagtactcacatacaaaccattgacttcatctttctccaaaccatttcatctcctgcactatcactaataagggactgggattttgaacttcggcacttctattttaaaccataggctttttttcctgtcagtttcctcttatccaggtttactttgttgaaatgtatttattaccatgatggagggacacccagtataataaccatcactggcccccaaggactgaaaatttcagggtcattccttctactgagttggcctcactgtgaaggatatcagaaaatcttgtgctttctactgtagacttcaaagaaaatataattttctagactaaaatgaaaagaaatttgtccaatagattattcactgttatatagagaaagtatgtggtacttactaaacttttcattcattgatcacctgtgttggcatgatcaagagatacaatagcaaaagtattgactttaaaatttgtatattcacgttccaattgtacttatccattgaatgtatatgggactttgaaatttatttaacatctttgagcttcagttttccagatgagtttgaacagtaatagacctaccccatagaatgactatttggagaaatgatataacatatgtaaaagcccttgcactgggcttggcccacattacgtctgtcaaaatggtacatgacatcaagaagtactgagcaccccactcctaaaactgggctccgttacgacctataataggagtaaattaatcccagaaggtaaattagatgctcaggcacaactacaaaaggaaaatgttataagttcccatatgtcattaccatgccatttgcctggctaaaaaatgcagcgtttggaaattgtctagttatcaaggctttggacagtctaagcgatcaccagtgaacaactggatgttcagaggaaccccattaacaagtctacgctaagatccccaagggaaaagaatgaatttaagtacaaatcattttacagatgatctgtttatattgtgtgtttgctaattgcctagacttaacttatgctagctctgctcctatgaggttagcagccaagttaagagcttcaggaaatttcacaaaatctatactgttgatgtctttagaaaaaagtcagaagatctggcagcgctgggctcacatacacacaaggaaatattaaggtaggcctgagcatagcttccgccttttaaaaggggcctgcagtctctggtgaccacaaccttcattattcacaaggttacatgtacactcatatcaagcaggactgagcctttctttttttttttttttaaagattttattttttcctttttctccccaaagccccccagtacatagttgtatattcttcgttgtgggtccttctagttgtggcatgtgggatgctgcctcagcatggtctgatgagcagtgccatgtccacgcccaggattcgaaccaacgaaacactgggccgcctgcagcggagcacgcgaacttaaccactcggccaccgggccagccacaggactgaccctttcgtaggaactgctcagtctgtgtaatcatttgagtttgagccaccttagagctcatagatgtatatcatcttcctgtaaatgtcctttggccacaccttcctttccatatggggacagatttctaggtaataatcccagaattacacctccctcttttggctcctgtaggtccctgcacttccagtccaacatttttgaccctttattgtaccttccaatagaccgaagagccctaatgagcaagaatcagaatctggctcacaaaatcacagcaccttgcacagtagtacttagttctaagcagttaggtgataactggtatggaatggctaactgaagaaatgagaaatataacagggggggggtgcttcagaaattggacctgttgatgattagctgtgtgacctttaagcaagccattcaccttcctgatcttattttatgtaatgtaaaggtctcttccaattctaaaatccttagatccaataaaatatctaatctcccttgttcattttattcctatttttaagctgaacattactgacttgaggtaggctactaatgtccctatagtcaggatattagtaatataatccttatctcctggggtccctgaaagaactaattaataaataatgtggataaacttagatgaaagacaaaaaaaatgagaaaaaacttatcatatttttataattgcattttaaatggtaatcattgtaggtctgtgtttcatttatgaacagaactttagctattagtgtttgtaaaaaaaaattagttccaattttacgctcctttttccctgaggaactaattctcctttttattattttttcaacatttaccataaaattctctacaactcagtgtgtctgttacagtcaatctgtggaccctgcagccttatttcatgagaataaaggctttgcaatatgctttgctctccccatctcccaaaggctaactcagtgcctggcaaggagtaggtgcctcaaagctgccttttgcttgagtgaaagcaggagggaaaaatagcatcaggagaaaatgacgcatgaccgttgtgtggcctaaactgatgatggatctccaatgattttaggcatcatatcttcaaagattttgttttagcactcataagtattttgcaagaggcctcaaatgacaaatgctccaaaacgaagctctagtaaagcaaaatcagtttacgtttgaaagtctttgaaggagtgtgttgatctcttccattttggactgaggttgtggcactgaggctaccaggcagcctgtcttctgggcctttcaggagatggggactgggatgtttgaaagcagagaacttttagcaacccaaggctacaactttctgccacgtgtgtatagggaagagcctctctgaggtgatgctctgtaggtctgcacatccctggatgctagactactgcataggtgactgtggcccacgcataggctgggagaaccagaacccccaggctgcctcatgtgcagcagaattagctatggtgtcccacagagctatgactccctaagctggaataaactcttctgctttcttgatatgatgcttacatctagtttcctcttcattaagaaaactcctaagagtatttgcaaagtctctgaaaggtatcttggtactccctttgctgggttttatgttataattcagaaaatatagctatgtgttgatgacatcccagctatgtgttgtctttggatctcaaagtgaggctatggacacattcaccagagcttttgtcattagggacaaaggatttgtactaatctttgctcatctgctcttgtgatcagacacatattttaatatatttgtttgggcaaagagtgcaaggctgtgagtctgaaacagaattgtgatatgtagttcacaagaaaatgtaactgatgttgcatcaatgttgcccatagccccaaggtctggcccctctgagctaagttgaagctgatcttatgcaagtgccacttcataaatattttatggccttaggaaaatctgatatgaagattgttttctgttcctgcacatctttgacccttctctgtttcatttcttctttgcttctgtatcttgaccttgattgcttagcattagttttctcttgctgtgtaacaaagtaacgcaaagttggtggcttaaagcaatgcacatttattatctcacagtttttgtggatctggagtctgggcacagcttagagaggccatctgcttatagtctcacaaggtagcattcaagatgttggccagcagtgagttctcgtcttgaggcttgattggagaaggacctgtctcactgcttgtatagttgttggcaacattctattctgtgactgtaaaattcatggcagcttgcttcttcaaagccaataaaagataaagagactctagcaacacagacagtacagtcttaagttatgtaatcatgcacattgcatcgcctttgccatattcccttggttagaatcaagtcacaggtcctgctcaaactcaggagagaggattaaacgatgacatgaatttctgcaggtgggtcatggagcatctgtctgccacatggttccttctagtactctcattgttggtgtggttccggttgcttctcttgaatttccagttctgggtgtgtcatctgacccctagtactagtataaaacattattcctccctcaaaaacttatcacacatggtctacagggatttggcatgtgtgttcactcgacaagagtttattaagcatctactatatgaaagttgtagtaaacatatggaatatacaaaaatgagcaaaaatattgaaccacagcaaaaacaaaagcaaagcaaaatactgcattcacagagctttcactcaaagctccatgaatttgggatacctatctgcttactcagattatcaatgagtaggaacaaacgagcaattataattcttccaagtactataaagtgtgcagagtggagggagatgacgtagtcaggcagtcagtgaacacctggggtggagcgcaccttcagaaaaccagtctacttcccactgcctagagcaaggcaagggaatgacattcatgttctcattttaacctcacagaaacataataaggtaatattagtagccacatttaatttgaaaaaaagagaaaactgaggtaaataaagaagtcataggtcaaatagcttgtaagtcacaaatgtgagctttgagaccagatcttcatcccactaatgtccgtgttccaagttgttattcatatagaacggaaagaaatttgtttgttcctgtctatttcatccctaatttgaaaatagccttcatgtaagagatttgtgcaaattgtcaatctacattgacttttgattcagtaaaattcaggaaatttttttttctagaataaatttgaattttagtagtgcataaacaatattcaatttgtccttttattagtaatgagatggaagctttaattattgttattgaggatttagcaacttaaagaatcaggtctcagagatgagtctcatttaaatgtgcattttaataaagcatttgttctaaaatttgaaaaatattctaatagtttcaacgaacttcaaacttaagtatttcatgatgcattaaaaggaatatttttagaatcagaactcatcaacattggtgcagaattaacattctgtgtctcagtttgatagagaattcaactggaaagacattttcctctctgtgggattagtgtgtttatattcagtattataaatagaatagatccatagccaattgcaaatggcttctttcaaaattacttctttctactagtgtaaatgtacattatctcattgtgatagagaattatggttagtaaacatgtgtctatccaaaaagcaaaacataaagtattctgattattgaacaatttgtaagaaagctattttaggggtggttttgatcttcagccatctctagcttgatttgggtagaaagttggtatagagggaaactatttatttgtcagcatttgttaatcttccccaattaaggaaaatgaatgaaaaatgaaaatgaactttttattaaaatattatgctgactaaatggacaatacaaagtttcttcctcctctggagagccatttcagcaagtggttatctcactgacaattcatccatgtttgcttctactgtgaaagttcttcctgtctccatgaatttactaatcctgcaggaagtctatgctccttgcctatggggcttggcgcatgtaattttctccccaaaactgaccagtgattttctccaatcagcaagacctctagcaattcatgtgataagaacaaggtttttgttttagttttgattttggttttgtagttgttggtaggattttatgctcagataatgaaaacatatgaacagatttataaagcaaattattgaaggaccagagtaagtaagggatttgcttttgcttgtgtgttgtttcctgctctacagaaagtgtttaaggcaactgataattacaggttgagagtttctggttcctggaattattccatgtgaggctcttataaataggtttgtagatgacttccaaggcccattctaactctgacattcccaggtcctaccactctgctgtgttgtgggtaggcccagttacaaggaagccaacctatgttcttagcaggctcattggcaggttttatgcacaattccatttgcttaataattatgagtaaataaagatattttcacagaaatataaattcttttcatcatttctacctttaaacagtaaaagtaacactttcatctacatgtaaaactctttcataaaatattctgaaacaactaaaaatctctgtttttaaatatcattgtacttttgattatcaccataaattagtgaaaagaccttatatcataaagaaaggtctctattatgaaacagttctttttgtttagagaataaatatggctgagagaagtgtcagctacttctatgaatcatcttgaggaaagttacacattcattgagagtaatggctatgatgttgacattggtcacaagaatgataataataataataacaataagcactaatatgcgctagacactctcctctgcattctatatacatagacacattcaatcataacaacctgtgaggcggtgactttattatccccattttagaggtgatatcacagaggcagaatctcaaaaacagtgtagtatttccttaaggtcttgcctaagtgcagtgtttacagactgcaaagctttttcttacacaggagtgtttggttagtttttgcttgggatttatgatgtataatatatatttagaatagcacttcacatttctttggccctcctaacaaccctgagaggggggaagataggaaagtcattcctacgcccctgacatagaggggcacactgccgtttgagtggctaaatgccctgcaccctatcttgtagtgaatcaatggccagaagcctagagctcagcccttgaagcttctagttggttcctcaagggcccctgtggagcttaaaacaaaacaaaacaaaacaaaacaaacacaaagccctagcccatcccagagagtaacatatcctgcacaatgaattttctcacaatataaataaaatccccattggctgattcccaaggtctctgattcatccatgtcatttcttgacagagcccctcagaccccatctggattattcatctgcaaaaaccagagtgtgtgattagctccattctgtgcttctgcctttagcctacaactttattacccagagactcagcctctgaattgattctaacccctactctagtgtcaaaggatgaacctatagcctgatgatttcaccactcaaatggagaggcttttacagaatagcactgtttcctgattataaaatttaacccatgttggctttaggaaatgctgaaaaatctttgaaaaagcgtgaatgaaaagttgtttggttttttctttgttttttatattaaccagttttccactattaacttttggttgtacgtatgctacgtagtttttctggaaacacacacacagtttgaattgccctgaacatactttatgtaagctgcttctttccccacctaactgtataccatcaacatgctctcaggtggttaaatattcttctgcagcatcatttgtaagagctctgtagtgctgtacatacaaaagcgtataaggacatccattaaattacttaaccagttccttttctcgacctatctagattcttattttgggttgttcaatattataaatagcaatgagatgaacttccttatggataaatatctgattgcatctcttgttattccttagggtagactttgatgagaaaaatcacctcattaaagcaaatgtggatttttgaggaaaaagtgtctcaacaaggttccaagggatggctatctataaggtggccttcttgcactgtgtggatcagtggggaaggtattgtggaggctaccccgttgggaagtgatttttattcactctctttcctttggttccccagttgctctcctttcagctgtccctacacttcaggtcaatttcctatcgccttcctgacttatgttacctggaagccaggaagcctctcctaatggactgaaccacacctggggtttctcagacaagccaacggggcttgaggctagagactgggaagcagtatcaacagacaagaggggatgagtgacatttggaaaactctgctggtgatgatctttattggaatgaataacttgctgatagagactggatttcaaaaagtaagatttgctctatgggatctgttgtctgctgcagatggcttgaatgtgtaaaggaatgttggcattctccttgcttctacaggaagctctctttgaactctgagggcttcctaggaccaggaattaaattagattgcctttactctaaaggcctttgaagatctatttagaccaaatcccacattatttattttactgtcttcataacacttgttagtatctgaacccatttatttatgtccttgttcactatctactcctttgttagagggtaaactccatgagacagttacctcgtctaacttgttccctttatatctgcagcactagcacagtacccagcatagttttgagctcaaatactattgataggataagtgaaagaaaggattgttatctttctctgatcctctggatgtctacatttctagtatgtagtaagttgtgtacagattacttttttgttttgtatacggcatcaggtattttctctgcatatacgcatctccatggttttatagtatgttcttgaaggacagagggacataatttagagaaaaatttgcaccaactgaatgcatatctcaaaggggaaactaaatgaccatttattaaatatttgttcgctacctggaggctaattaaaattatgccaatttctgatgttcagtaccaggtataacttactggatctggcattttcagataaggcttacttatattttatcttgaaacattctttcaatcagcataaaccatgcctatctcaaggttggctcatataagaatttgaaggaggagaaaaactatttgaatgaggaaaaatgtcagtggaatcaatgattttcaggttaagactcaaatgttacatttcccccttgatggatttgaatggttgtaatatattttaatggaaaaataaattaaatttaccttatgaaaagtaatgtagttatatcagtacaaattctatgccaataccacctccccagttctttgttattggaactcatctttccacccattacatgatattcacattgccgtctgtgttattcatatatgcctgctttgtgttgcttcttaaaaaattctgaattaatgcagagcttagagagtagagagaaaatgcaaaatcaagaccattaaggtaagattgaaagagccatttgtttttattaaacatgactttagactttcgaggttggaacctaaacatctttccaactgatgtgtttaattttctcctttccttcagtctctgatatcaaggatgtacccagacaattcctcttcctatgagctatgcctcctctctgagcccccagaacactagatatgcccacatctaagcacctaccatagactgttgaaatgatctgtttcaacaaatgttacctgaacatgctacatgccggttactgtgatggtgttaaaccaaagaaatccctgcctcctagaatttaaattctttagtttacccacatttataaatatttttaatctattcttggctgtatgtattatctatgatcagtgatcatagaaaacaagaaaaaaaacataaaaaccgcagattcaccaatagtttcctgataacttcaatttatacactgagacaaatatacacacacacacacacatgtgcacacgcatacacacatgcacaagccacgagggagaaaagagatataggcaaattatttcatttcctctttctgtgagatacaccgtccaaaatggcagaaggaaagagaagatactagagcagtatatgatcagctaatcatgtaatcatcttgttccatttcctctctccgtggatatccattattaacaatttgatgtgtatccttccagatctttctctatgcaggtatacacaaatatgaatatatgtaaatatacacaatagaaaatacatatgtcattatgtatgcatacatgtgtatatatgataatgtgtagatgtaataatacaacatgtacacacatatgtggacacatataggtttttctaaacaatatgatcttactattcaaatttagaatttaaattctaatggaggagtcaccaaacaaataagcaaatagatctatgatagactgctaagtaaatgagtgttgtgaagggaaataaagcagagtaaaggaatagagagtgatgtggtgggagcactatcctaggcctgttgggatgggatcactgaggagggacatttgttcagagacctgagcacaatgaagaagcaagccatgactagattgggagaacattataggcaggggagggcatggaatatgcaaaggtcctgaggcagaggcatgccccgtgtgtctgacaaaagacgagaaggccaacataacgagcagggtgtgtgagtataagagtggaggaaataaggcagggagacagagccaggagccagttcttctcaaactaccactaacacagggacctcaacctggggtaggtggaccagagcatttagggggtccatgaacctggatgcaaagaacattccatctttattttcattgaccctcacagaaatttaacattttgtttaattgtgaatgtctgcaacaaaccacagtagtattagtagcatctgtgccttcataaacaataggctttaaaatattttcctatcatattataattgtagatatctagaaatactctatgttcttcactactttgaaattatagtagttattagacttgttgctaatgcgtcttttcagtattttgattacaatatattgcactgtaataacgttgattttctttgtaactttgtatcttttagtttatatatttaaaaaacatttttctgaaatgtccataggctttaccaaactaccaaaggtgtaattggtacaaaaagaaagtttaagaatctccgtcatagtaaaataaatattgtaggtcttgaccagaattttttaataaaatgtggactatcatagtgcatgagacacagtaagtaaaagtacatgctaggtataagttttgtgaaacttgtgtgtaaggtgtgtctgtgtgagtgtgttttgagtcatgatgtctgtttcttagtgtaagatcataataaaagaaagttgaaggtcaatgattaaggtggaagcatgttgacaagaggtaggatgattctggattacatttgtgaatctctgtaagggatcttatagtcctcagaccatagaaagtgcccatacacatttcttgatgaactgaccttacaagaaatatggtatttctgcttcaaccctctaccagtgtttttgattccttttctccctacacctttcctgtattcttgctcccagtattaacctctctcttctgaatcttgagcctctacttcttccctgacaatatgtctataaatacacttacaattctccctcgaatcatgaccctctttcctttcttgcgtttacattaaaatactatgaatgtttccatcagtagctaggaaatatttactaggcaccatttagttcagtcaccatgagcaagaccctgccctcctgggatagacagtgtcacaatccattatattccacctttgttcccaactctgcactgatgtagctttttctcatgtcactagtgtccaaactcaatggacattttccagtctttatcttccttgacccttgcccatctctctgtttttattttccacatctgttcagctcataccttcctatcagtgatatcaaactacttagtttctcaactttctgcttcctttttctctttcactgcatatgtttttcctctctcactggtatgtcttttgttttggaagttcttttagcaaatttctaatcatctttcaaattccaggctaagtgttgcctcctcagtgaactctctctaccttccctgccccttttactcatttctaccttcctccagaattaataacctcattctctctatcaccaaacttcatgtgtatgtgtgtgtgtgtgtgtgtgtgtgtgtgtataccatattgcattttaactacttattttcttacccacctttcgtactagacttgggagtttccttgaaggcagggaataaatcttaacaaaatgctttgtacaacatacgcaccccaagaatgcttttgaatgagtatattaatgaatgaatgaatgagagaaattcttctactattcattcaacaatgaattaaaccccagatctagggcaatgcctaacacataataggttctcaatagtaatttattgaataagttgcatttccttcataatagacagatgtaaaaatattgaatgatttataagaaataatttttaaatttggatatattttgcctattagacacactcccagtagctaattattacaaccaatttttacccaattctttttactaagttcctccttctttatctatagtatagtcactgataaagaactattttataaatagattaaaatattgtcttcattaaaacattatatatggtaagactgtttttttaactcaacaagttgattgcattgcccttctgtgtgtacagcaccttcttcaaagtgacgctgatgctttacaccagtaaagttaaagcctttgccagggaatttgtacctgtgcttaccaggggaaggaacaaaaacaatatctccaacagatgacagggtctgaacacaaggctattcattccacccagcaatttatcagcaatggtgaaccaaggcccccttgtcaaatacaagcatcggggtaaagaacaggtcatttcacctcattgaagaaagcattattaacctgctcatattctttatgtgtgtccttgtctctcaggcagcttcctttcttcctctgattgagtgcatgtgcttatttgtgtcttgacattgaccacaattgggaaagtcaggcatctgtgccacaaggtttgaacattagaaataaatagacctgcgatgagcttccacaaattactgatgttattgcagctccaagtgccataacaccctctcccacatcctatgacaaatgacttcccatctttgtcagatgaaatgaatgctaaagtggtgttctcaagatcgggcacaaacatctaaagagaagtgtaatcatctcaaatcttcctgtaaatgcacgtggttagcccgttgagtagagctcaatggccaccagtcattaccagaaagactgacgagtaaaacagaaagaggaggaataactatttttcaccaaagagccaagtcaatattgaggcaagtttccaagaaataatggaaacttagaagctccatctttaccacagaatatacactagtaaaatatctactgtacatattcacagatttggatattttctctatgcaagtgactttttttgatcaattaagcaataggctttggaaattagcaccttgggtaaaatttagcaaatatacactaaacctggaactgctttctatgacgaagatacatctatacaaagaatttaaaagttttgtacttggaaaatgtgatgaaacttaagtttatttaaaattaagtaggattcatttacctaattttcgtgcattaagagaacaagaataaattcatagaccttgaagagaatccggtcatgcttccaatctgtgaaattcagcagagcgctccgtggaaattaaatcatctaggacagtaagggagaagacatttctgatatgattaggccaaattaagaaagagagtgtatatgcttgatctatttaggttgctatattagtttcctagggctgctgtaacaaattgccacagactgggtggcctaaagctgtatgaatttattctttcaaagttatggagtttagaagtctgaaatcaagatgtcagcagggtcgtgctctctctgaaggctctaggcgagagtccttccattgcttcccagcttcaagtggtggctggaaatccttggcatcccttggcttgtagctatatcactccaatttctgcttccatcttcacatggccatcttctgtgtgtgtatgtatttaaatcctcctctcctaataaggacaccagtatgaactctcctaataaggactaacccagtatgaactcatcttaactcatttcatctgcaaagaccctatttctaaataaggtcacattctgaggtccaggtagacatgagttttgggggactctattaaatttagtacagtttctagactgctttatttgaaaccatggttggttgaatgactcttaaccatacacaagtggcctgcagctgcctgtgagtgtacaaggaagccttagagaggaagccacagttagcttctcagaactgcatctggaagcagaatcaaaacggaaaacaatcaaattgctgtaaagtaccaatatgtcaaattggccttttgaatattagcattatatatcatttctcacttactttttagtattgttagtgtttacctttacttatcaaactattttatttgtttgcaagaagtactgcttctctacatatgctaaattgtgtgttcctccttcctgagtagctatccctctatctcacactttattgtctactgattcaacctgcctatgcctcctgggtacaccatgcagctgtttcttaccttggggcctttgtccatgctgtccctcagcctggacactttgctctggttcccctcctgcatccctctcttgggtctgcttatcctttcactctcatctcaattagcacctcctaaagaatgactccctggactctgtgctcacctttattctgagctaagtatcctctctccttctcctggattgttcagtgcaaaacactccgtttgtacttaccaaacagcttgataattacctgttaatgtatctgctttcgcccaatacattctgagttttggaagcctaggaaggtatttccagtacattgcagatccagaaaactctgtgtaggcaaatgcataagcagctaattgactgagggtgaaaccaaggcacagtgctaggtacatactgcagagtgagtaaggcttccactctgccctcagagaacttgcattgatggcaagtgatgtgcctacaaatcatcatgttttgagacagtctctagtgcaagaggcaaaatggagtgcattaggaaatgagcagatggagcaattattccaactgtgacatgatctctagagattttatgacaggtatggtattcaagctgcgcattgaagaatacttatttttttctggagatgggctggtggggaaggtaggagtgctggagaatagtgaagagggggaagaacttttcaggcagaaggaaaaaaagcatgactgaaggcatgtagttgtgtaagcccaggacccattgaaaaacagtaaagaattcagttttgatgcagggttgcaaacacgatcagatcgttgtgctgaaaacaaatggagagttagatgggaagtagatcacagagcgcttgaatggcagtgcaaagaggggatgttacaggagtgtagcagagggaagctgtgttcagagctctgtccgccttggtgtgatgagccctgactgcccagtctagataggccttggagaagcatgtgagggagtcaatgtagagcataaggatagcccactgctgaggaacagaccgcgactggacaagggacaagaggggaaaatgatataaataaaagaacagaagtgggatctaggaggaaggaagtgatcaaacctagcgcagtctgatggaaggaaaaggaaaccagacttgcaagatggagggagttattcacctacagggaagcaaagatggaggaagaagagaactaaaaagtaggtcctgatgtttgtctgtgtgaccgctctcatgccccagccaggatgaattgcactcttttgtgttctagtagcattttatttaagctgtgttaacagagtggtactaaatttgtagtctgcaggggggagctgtctagcaaactattggctacccattcacaatgacaaagtacagaaagtgagcatcagcattcaaaaactattgcagcaattcgatgttatcacaacagccataagggctattttgtcttttacaaaaatatctgcatataatggattagaaagaaaaaacaaaacgaaatttacccttcaccacagaacttggaaaagctctgttctgtaaaaccagttggtctcactgaaataaaggacagtttacctgtctactccttcagtagctggtcagatctgtgtggaaggtggagggatgtatttgaatcctttatgaacccccagcttcaagtattgcacagagcacaacacacatgatcaagaactagttagaaggctattgatcttgattaacagttggtcatttttttactgttaagacagcaatttcagattgactacttgaagtagaagtcatagaactgaaacttaggaggcatgaacgatcacaagcaggaatgagcccaaatacataaacatgagcaggcaagagacaatcctcattagatgccacaaaagatgcaagaaaggcagtaaaagggagccagaaaaggtataccagttgtatgcttcaaactttggggaagaaacccttagagaagaatagactcaaaatgtggatggaggggagagacttacactgaaactgtcttcaaaattgtaggacacagagaggtccgactgatgaacacacttcccttctgggactattatttctgctctgaccaagtcaaacatctattaccgctgaattggaaaagtgcttccaatttccaaggtcctaagtgtggtccatcccaaaataacctggtgtccttgacccgacaaaactctgctcttggttctgatttaccctcagaaagacagatgattactgatttcactgcaacatgctcagtgctgttgacagactgaagccgttctgggctaagggtctgctacaggcctgtgcaggcttttgtggttacacttgatctacctaaagaatttcaattagtttccatctgtgaaataaaaaattgaattcttctaaatgccctgagctctttctaagcaccggactgtgttgccaaagtgacagttttcaaggaatctaggccatttttcacagaagcagagtctgatcaaaagtgaaaggatgttagtgacaatctagccaagcttatatttcataggaagggtaactaaggtacaaagtagtaaaataactagttcaagctcacataatgagctattttagatcaactagaatgaagtttttctgtctgcaataccctgaacactctctaatacacctcaacgcgtttctgtcagctctccagtcattgcattatggagttcccattaggtacaaaaattctcccagaccctgaaaccagttgattgttctggagaaaaaaattctgatgtgtgatttttgtcattgcccagtaactgtggaggatcttcctatgtttcaggatgttgtagagttctatagcgattaagaaagaaactactaacaagcagcgttaacacttgcagaatagaatccatgaaaagaaagcaacctttaaaatgaggaaattcctgtaaattatttagaagttttacgggcatttgaactcctgctcctcaaatgcaaattttaggtttttaattatttcatcaaaatcttatgtgggcaccaaaagctcattaggaggcgagggactggatttagactacgtgaacttgcaaatcccatcttcacagtgaggtgttcagagtgcctgcctcttagggatctcataaagaagatttaaggtaatccatgtaaggcacttggcatgatgccctggacatggtaagcactctataaatgggaaccactgatatgaataattaggagatggccctgcagggatgttgcagggagggttctgtatgagagaagagcttggacatggtaatgagtaagatcttttctgtttctgaaattctgtgactctcgtggtctttcctagctttaggccattggcaagtcgactaagcctctatcttcatctctagccaaatcttccttttaaatatcttcttccagtacaaattaatcagcaggccccagtctgtttgcattcatcttcttggttttaaggtgctcagacattattccaaaggaaagaaactaatccagagtaagcaactactgtgtgtcatgatcatcattcgtattacttaatccatccagtatcctacaagggaggtagtgtcattgcatttaataaatgacaaataaactctcatatatatattaagtgatttatccaaagtccaaggtagagtgatcatagagtttattgcacaaaccagaacacttttgagagtaaaaggggtcactattgattattctggatcaatagttataaatcatgactgtcccaggtaaagaagggcaaatgttcactctacctgtggctaaaatgaagttatagagccagaattcaaacacaagacaatctctaacattctgtgtttaactacaattatgttcaaaagatattccttgttatcatttttttatgctaggctgctcccagtgcaagtaaaaacttggacactcataagagaacctactgaccggagatagatctaggggtcaggatgtcaatagcttctggagttggaatgcagagtcaaggggactgttataagctgaatgctgtgtgtatccccctaacttcctacgttgaagccctaggccccactgtaatagtatttggagggaagtcctttgggaggtaattaggttgaggttaggcagtgagggtggacgctcatgatgggattaatgccctattaaaagagggagagacatgagacctctccctctctcttcctacatgcaccgaggacaggccatgtgagccatagcaagacagtggctgtctacaagccaggaagcagggtctcatccaacaccaaatctgccagcacctttatcctggatttctcaatctccggaactatcagaaataaattcctgttgtttaccccactcagtctatggtattttgtaatagcagcccaaactgagtgagagagggacaatatgaaggcatcatcttgaagtgcctgcaagattcttaaaactgaggacaaggcaactgatgagcagggcagaaaaacagagagagggatattccagatgtaggccaataaaagcactattcttgtcttcttcataaacggaagaaatgtgaaattgcctggaggatatcctctagctgatgactaggtggcctcagcagcttctatagggtaaaccgtagcctccagtgtggacaaggggcagctagaggcaaaacagataaggctgactgactgtttctcctcctagcagataagctaaccaaacagtcgtattgaagactgttgtacaaagaaaaacatacacacacactggattttgatcaattaagtaagtttgggaaatatatcaccaatagattgcattcacaaattgaagaataagaaaggagtcattggcactcactgcgtctgcttggtgatttgtacttttaccgacagttcatttttaaggagactgtaggacatgccaagcaatgttctacatgctttgtgcgtatttacagatttaaactaagctgtgaggcgggtgctgctttgttctccatttaacagatgaggaaactgaggcacaaaaaggattgttaacttgcctgagaactttcatatgcaaagcaggcagattagtttcccatagctgctgaaacaaatgactacaaacatagcgacttaatgtgacacaaatttcttctcttatatatatgtatagttctggaggtcagaagtctaaaatgagttggcagggctggttcctcctatagagactctaggggagaacctttttccttgttttttctagattctagaggccacctacattctttggctcatggccttattctccaacattaaagcatggcatcttctaatctctctctctctctctgcttctgtcatcacatcatctttttatgaccttggccccactgcctccctcgtaaaaggccctttgtgattactttgggcccactaaataatccaggataacttccctatctcaagatacttaacttagtcacaccggtaaatttcctttcactgtatcaggtaacctcatagtctgccttccacagcagagttcgagcccaagtctggctgaaacacagtgcctgaaaaatttcagtaaataatttatcttgagtgagtgctatatgccgagtacttgcatacacgatactgaagaaaacaaccatgatcctgctctcatggggaatgctggcattaaaaaatacacaatcactgttcaaaattgtgttaagttctataaagcaaagaacggtgtgctgtggaaaagaatagcagagacaaggaagggacaacattacaaattagaagtcaaggaagatttctctaaggaagtggcagttaagcaaaaatccggaggatgaaaaattacatcatttatttaaattaattatttctaaatagtacttgaaataattttttcaaaggtcattgacagtagttatattaagagattaaatcatgggtgattccaaccttctttctgtttttttccccttcattttccaaaatttctaaagtgattaattttaaattagaaatattgcctttaaattagaaaaacgaaagacactttattttacgaaacagatggggcatgtgtcctgttctttaaggttgaatctgtagaaaatttcctcaagcatttgtgaaaatggatactgggcctgtttccgaagtgtctgtctttcaaaggcattgaaatttctttaagaccagtgcttccttagattgtgccttcctctttatactcaacatggtgctaccgtgaaagaaatatgaagtcaacactccaagatacaacaaaaattggaatatatttcagtctgttttgaatattttgctttttcagaatatactatttttaatttcaagtgtgcttgtattttggtatgggattgacactgcctattctggaatccaattctagtcatttctgttgctctaagaaactcatccagtctatatttagaacaattgactcagtagaaaaaagaaacaagcctcttttatcaatgtttgatctgatagatgcatccaaaagctggtcagctttccgctgaatgttaccatgggcaacggttttaagaacctcatatgaataaaagagaacaggagaaagaaatactgtatcttgtatggccatgtccatttgattgatgtggctttctaaatttagatcttaacattttgttgatttatttctctgagcccttatccattctcccctggaatactgacatgcatacctaattggtctcccttcctatcccatcccagtctttcaacccactgctgccagcgtaatttgccaaaatgatgctctcaccacatccctctctgctcaatgtagtgctacaactatttacgatgtgccaggcattattctagggctcataaggctaccagaatgagtaagaaatagcttctgccctcaagaaaactcagggagttttcatttataatctagtggaaaaaaggcacatttagactgtgagctctaacatatggctggatgacaccagtgacaactggagtctaaggagcaagctttaagagcacagtggaatgaacagtgaattatctaaaagccccagctctaactgattagagtaccttgtgggccctttgttttagttccagtcctgtagatttagcccattgtttgccttcatgaactttcatctctaccttgacttttccataaactgccaaaaatgtttctccattaggactttttaaaaagccaagttgaagaagattcaagtcatactagtttgaataatgatgggaattttttgaattacgtacctgaaaagtttggttttaaacttttggaagttatctaaatgtgaagcttcaggtgaggctaaatccagcatctaaaatgatatcacacttaagtcctgctttccctcttcttttctatgctttccagcctgaggacccctggctcttctaggcagaacctcaagcagtagcaacactgcttagttctggatgcaaattcctcctacaaactgcaaaacaggaaatttctattgcttaggtgtctaacacaattcatgaaccttattctcattgccctgaattgagccacagccccattcatgaatcaattaccatcactggagcattatattattgtcttaactcaatttgggcccatccctagagttgatggtattgtcactcttgcctagtgaatatgggggaagagtgcttacctaaagggagaacttggtactgttttatcaaaagaagggtgaataaactggatggcaaaataaataaataagaaaggaatgaatgaattaaaaaccaaataaataattaacaagacttttgacactcattcttagacaatactttccataagattttctgatgctgttgaaggaatccccaactcaaacattgtttaaattcagaaagtccatctcatatattgtgttttcctcagaaaacctggcatggtaacttgcacagaataagctcacaataagaatttcatcattgcttattctaaaaatttctgctccacaattgtaatgacctttttttcctaaaagtaaccaatgttctctctaattttaaaaccaaagctccttctaagtcttttcatgatgatttcctagctcatttcttttcagcactgaataatatttcattgtctggatgtaccatggtctgttcatccatttacctgcagaaggacatcttgtttgcttccaacttttggcaattatgaataaagctgctataaacatccatgtgcaggtttttgtgtggacataagttttcaactcctttgggcaaataccaatgaacataattactggattgtatgataagaattttgaaagaaattgccagattgtcttccaaagtggctgtaccattttgtatccccaccagcaataaatgaggatttcctgttgctctgccttcttgtatttgctgttgtcaatccaactacagttttttgaaaccaattcattttatcaaggaaagatttgcggatctctggaatttgaaccgctgatttgaggccttctaacactaacctctcctaggatgtagattagagttaactatcacacatatatgagacattttactgagacattgtaaaatcagttataaagaatatagcagaaaacataaatttaggtccttctcaaggtttgcagtgagagaaacactgactgagcccacagattcttattctgaattccatggagactaatccataggcctcagggaatctgtgaattctccataattgtatgagaaatcgcaatatgtatccttttttctaagtggatagtttacaggtttcctcatcttcctagaagtatcaacgccctgttagagatagagaacaagtacttcattatggatgtaaaagctgagacccactcattcattcactcattcatgcaagaaatatgcattgaattccttctatatgccaagcattattctaggacttaggaatacagtggtgaacaagttgaacaaattccctataagtatggagtgaaaaattcaggtaatataaagtcaagataaatgtatatggcatatataatttcaggtactgaaaattctaccatcaatcaatcagtcaatctataaaaagggagagtaaccagaagctactttggatgcagtgagtaaacattaactgacctaatatttcatgattttggatcattccaaaatcgcgcattattaacccagtattctcttctcatggcctatgctcagtcacacaaatttctaacagcctgctggacaccatcaggtgtacctcacattagctcttataaatcaaagttttccaaaacctggacgttttcctctcaataccccctttcatgcctttgaaccagccccagcttctttttattcctttttactctctttttatttaggccagcaccaaatcccattaagctcaattgctcaaactcattttttactctttctttcctccttgcaggtcatacccaatcactttctaattctggctcaatgatccctcactttcaaatgtgaattttaaatgttcattttaaaagttggattctaattaggttattggtctgctataaaaccttttattgtttcatgatagcttctcaaatcaaggctaaactccttctgaccttgacatgtctgcagtttatgatccccaattgcctcttcacacgtaccaccaaccacgtcaatcactaagccgtggtcaagggcactatgaaaacctctctgaagtcatgctgggtagtcttgcttttgtgcctttggcaatatgaccaataagcgatagcagcctttacaatgattattgagaacttacgagtctgacacggggtaagcactttgctaataataatggcaggtcaagtaacacagtgctgagaacatgggctctgaatgccagctctgcaacagtgaaccttgggcaagttagttaacttctacacctccgtttcctggtgtattaaatgagatacaataacaccaacttcataggttgcagtgaggagaggacaaggtaatgtagcttcatgccctgcctggtatatagtaatcactcagtgaatgttgattgttagtatcaccactaaaattcataatgggcattcagagcaatttttattctctctttttctgtatgaggcccacgagaaggagagatactgcgtagtctgctgttagtttcatttccatttcagcaagtcagaaatctttacatgtttcttgcaaccttctctacgaagactttaatttatttttctcccttaaatatcattattctttgtttatacttgatctagggtattcttcacatcatatggatgtttgtctatatgtttcatcttcctaaattgggtagtaattcctttgagagattatgtactaggatagaaagaaccaaggcttggggtaaagggacctggttttgaattctgcctctgccacttttcacctgtgtgacactgagcaagttactaacttctctgatcctcagttttgtaatttctaaaatgagaacaataataccttccttctagtgtgttcgtgaaaattaaataagctatgaagagtacttagtacagcacctggcatgaagcagggtcctgttcagaataaattcccttctcacattctccttgagaggacgaatttactcagtctcatattctccacaacagttagcgcattgtcttacaagtatttggtgctcagaaaatatcaaattaagctaaattattattacatccagctgtagcaaatggcaatataaatagtgaggactcattagaatataaagattctagctacatgtgtggttactataaccttatcttttcattatgattcaataactgcatatcagaattatccctgggtttatctcttagaatagctcctacaaactgccagtctgcagaattgatctttctgaaatcctcccacggggaaggaattcctcactagtctttgtcttcattgcgctttgcagatgccttggccatagactttaacactcaaattgtaagtgttacttcacatttaagtttttcctgctaaactgtgatccctttgaagagaggccccctcttattcatctgccatccctagtctctgacacagcacctagtctgtagaaagtgccaggccacgggttttggtcctcaaagaacgaaggagacaggagatcatggtgatatgtaataaagcccctggagtttcagaggagcacggagaaggagcccccacagaaaacgagcccaagaaggctttctgaggaagtgatgcgtgcattgagttccaaaagataaaggagaagaaagcgttactaagaaaagaacactcatttggttgcatcaatgaatgtgtcttttagttaaatctcaaagaaacgtagattataacattagctattgcgcttaaccataaaaaggctcacaattttccttacaacgaagctgcatcacttgctaattgaagtctgttcattaattgaaaagaaatacaccaagggaatgaagatattttataagccatgcattgtaaattagatccttttaaactgttccaagatgttctattgtttcaaactcatccttgaaatgagcaaacaggtctccctgaagacctccagaaccatgtcagagtgaagataatatattctgttatcattccagttaatttgtgaacgtgaataattagataaattggctgtcaataggtacctataggattaagtgctattacaatcctgccgataagggccgcctgcgcacgctgcatggatatcagagcatattcttctccccgatatctggatgctggtattcttgggactcataagggaaggttacaagatagatactatgaatcttttcaaaaagttcacccagggcatttgctaaaaattagccctggagcattggaaagactatgtaaatgaatcacctcctgcttgtctgtccccagagctcagcctctgcatgtgaaaaaggctgataataaatgagaaaacagcatgagaaaaagcaataagtgtagaccctggaagacgggctggggtaggtttttgttttttaaggtagattgcatatacatacctgtatatatccaaaggtttacaaggtagtcaagttttaaattaatggaagctaaacgtgtatacaatgttaagaattatgtgtcagcttcaagatatgggaatgaaatgctgtatcttctttttgatatagatggaaatatatgctatatttatgtaataaaactagtggaaatacaccatctagattcatcatttaacaaaaaaatatcaaaaatctttatcccaggtactgaaaatagagaattatataagacaaaatccttgctcacaaggaagacagtatagaaaaggagacagatgactaaactaatcatttattacacggtacaaactacacagcaaaagaagcatatgccggggcagagtcagactagaagaggcagggatgctgctgggactttgtgtagaagatgacatcagagctgggagtcatgattttgtttttaaagattggcacctgagctaacaactgttgccaatcttctttgtttttcttttcatatccccgtagtccccccaagtacatagttgtatattctagttgtgagtgcctctggttgtgctatgtgggacgctgcctcagcaaggcctgatgagaggtgccatgtccgtgcccgggatccaaaccggtgaaacctggggcagccaaagtggagcgcgcaaatttaaccacttggccacggggctggcccctaggattcatggtttttaatgggtcgcacactatgttgtgattgttccagatctaaggagagaataagttagttgttgaaattattatattttcatcaattaaacacttactaccagccaagcacagtgctaaatattttatatattttctcctcatggctgtaaggtgaagacacatcagtattcccatttacagatgggaaaactgaggcacaagaagaggataaatcgactgcactcaatcataagttgcaaggtcgggatttaaatccgggtctttgtgaatgcgctgcctgagttgtaaggcaccccgtacagggacattagaccttcctggtagagaaagaagatttaagctggttaagtcaaagatttcttggaagagtggaactaggactgactcctgggagttggatggaagggagcaaggcagagtgtaatggtagaacatttgtgtgtggggaggtgagcaagtcaaaggcatgatttgcaaccatttgggccaaactagttctctctgatcctttgattgtttggaagcatagtggcttgatcatgctgattcttccagacttccaatggattggatgtcatttcagcactccagcacaaggtttgaaaagtgccccactctaccccatgtgttctaggatagcatatgatgataccttgcatggtggaagcagctgagaaatgatgattttttacttgattctcatcttgatgagaaccaaagccgtcatatattagttcaatatagttatattttcctcttcctttggcaatgttcctcaaccttttttcactgttgtcctcctaagaagcctttttagaaattgtttataatccccgccaatgaaattttaataccagatatgttgtatgtttgtttatgtattgtatgcgtatctatgctttatacataaaaagagcaagatttttcattatgagccaattttcacccccttggcactgaaagagccctgatgatgctgaatggctcatgctatgccttgtcccctattttccatcctgttgtaatagggccaggagaactgtggaaacagacaatttagaaccaaactaggttccgagacaagttacaaatcctggctgaatgcaaatttcttctgtgaaaaatgctgataataatacgtacctagggaaattttattaacagattaaatgagataagccagaagcaaagacataataggaacttgggaaatactaattactttcccatgttcctgtggtatagttcctttcaaactcagcctttagactgcatttttcatgggctcatttgctcccttgtccaagaagatagaagcaaggagggagagtaagcacagaggggatttaatacatggaagaagcagcagaaggctccctggggaaagtgatggagcaggtgtcctgtcaggatggtctgaagagggagcatcttgtgtcctctgtccacactgatgggcaggtgccatccaagcttttagcatgagggttggttcctccaggcagtagactctttactttgatcaatcctgcagtggaagagatctccagtgctgtgctgaggaagaggacagtattcagagaaaatctaggatcaagctaactctgccaattgtgctctgacctggacaagtgtttaacctctttgggcttcagtttcctcatctgtaaactagatttaaaatgaacaactaagttagcaggttactttgaagattaaataaccctctaggtgtgtagcacctagttagtgcccaatgtaagttactatattttctgtctaagcaatttgctctgaaatgtcctagggtataattattccatatacgcaagggataaaaaacgcatactttgtataacaatgaatatgaggataataacttacatttctagagtacttcataaatacaaaatattttcaccttcatattcctgagaccactttgtgaaataagtaaaaataacattattgtctagattttaaaatttagaaaactcagatatcgtgtgacgagcccaaggtcacatggcaatggatcatgtagctgaaattcaaatccagtttctttcattctaaatcaagagctgaaccccacaattgcttaacagtacttacaaatgctcacttttcaagcataaaatctagtgaatttttaaaagttcctaaaaatctatcagtaagcttcattgaatttctattttaatttttatccactggtaaatgataaatttttaatttaacttaatgttaaataagtaattggtaaatgtgcattttacactgcatatccctttccctaactttcactacatacatatgcaactttgcattccatagccctaagtttcattgagatcttatatctatgaaattcagtttaattctccattaaagaaaggatttgagaaaatagtacttttttcatgggcttaaggtagaatgaaggattgaaaattgtagccctttggcaggaacttggaaggaatactaaaaggaatttttcattataatacgtagaaagttttgcatgtaagatacaatattagtcaataatgatcaaattgatttttttttactgaggaagattggccctgagctaacatctgttcccaaccttcctcattttttgcttgaggaagattagtcctgagctaacatctgtgccaatcatcctctactttatgtgtgtgtcactgccgcagcatggctgatgagtgatgtaggcctgcaccagggatccaaaccagcaaaccagagccaccgaagaggaacgtgtggaactcaaccactgtgttatggggccatcccccaaactgatacttttgtttattccatcaaggttattagactaaagtctacctctagccactttttgcgaatgccttttaaaaataattttgctttaaaggacaatggcaattgggatgtaacttgtaattattttatataggatatcttcctttctttgcctggatctatgcaaataatagacttctagctttcaagttcaatcaaagcttatttttaatctgcatgttaattccctagactattttgatggtagaaaatctcaccaagggagaatgcagatcagaatactaaattccaaaagcgcaacctctccttccatattggatttggcagtttaataagaatggcagctcagcacaaaactgctcagaaatctttggagcattaaaggaaagaggcaacaattcttaatgagccaccagtctttaccaggcagctagtcgacttaagataactttctcattattcacgagtctttgagggcactacaatataggttcctttattaacagctctcctgtcatccattacttaggcatcgttccatgttaaatcaccagtgtgtcagtctcccaaagcaatatacctgagagttttaaataaccatttgacagaaagttgtcagaggaagagcttatttcaactagttaagcatttgagcatgaacaatgctgtttatagaaaaaagcataaaatagatgaaaaattaattattaaagtttatttaattagaaaaaccttgtacttaaaatttgacttactaatgacggcatcgcatttatttgatggaggactaaattcgattagttatcatgaacctaaatataatttagtgaaattttaccaagcatctactatattctcaacactgtgcaggacacggatggggatttaaaggaaatacatagattacttccctgactttcaaaagcctacagtcctgttggggaacaaaagcatatatatatgacctagagaataataaaataaatcttattaaatggccaaatatgtggtaaagatttgcattactaaaagagtgagttcaatatgcacggtaattgcagaaagcttcaggaagagatcccactggaaagaagataagcagaagagaagaaaaagacagtcatggaccagaaaaaataagaatcagagaaatataagaatcaagaaaaataagaatcaaagcatcaaagaatcaaagcagaggctgaacaaggcaggaccattgggcagaaaggctgggatgattgatgcatgttaagagcccagggaaatgtggtttgctgcaaaagttagagaaccagattatgaagattattttggtgactattttggaaatgatctgtaggtaatggggaaattaccataggtactcaaaaactgcattgacccacctctctctcacagagagtagtgtggtggcgttaggtctatggttaagaagcatgagaaggagggagggcaattaggaaaatgcataataatctgagaatgaggaaaaagatctaggcatacagaatggagtacaaaataagaataaataaaggaggacacatttcataaattgcatgtttttataaaattcatccaattcaattgatagaaagtaaatacaatttttaaaaaaggaaataattaactgattgaaataaactcttcctctgaagacttgctgtcatatagttatttaagagatatattactttaggaaaatgtcgtactgatgatttaatatgaaatgaggctgaaataatagattgaacctgagatattaacaaaggaacatatattatttgatgccaccattgcctgggaagctagcctcgcctagaaattagccacaaagtaaattgctgcctggggtgttagctaccccaagattgcttgaaggtttgtgatttgcttgctataggtacatctatgctgatgtattcatttttttagtacacaaataatgtatatttattattaaaaagttagaaaagttttaaaaaaaaagaaatgagaaattctgaaatcctactgctcacagatatatactgttaacatttggagtattttgttcttgtacatcatctaggtatatatttacttgttgtaagaagcatttctaagagtaagctctattctgccatctctcctttccctggctcatctttaatacttgttttctctttttgtctctttcatttttaaatacatttattctaatacatcataacttgtaaaaatcaaatcataacgtttctcctagtcccacaacttggaaacacagagaattctctactttctgtaaaattcaagagatctttatagacataaccagtgacaatctgtctaacccagaatatgtctcatttccggagtctgggaaagcaattgttctgagagaagtagtcactcaagttgcaatgggctaccaaaaaccgtgcacatttcatgtctttaggagataagtggcaagatatggcaacatcaagatgcacaaagtctacagggacgatgagtgcagttaagaaagtgtagagccgaatggcactggcaaggaaactgtaagggacagccctgggtgtgagtcccaggctccacctcacttaccagctgtgtggtgaacttgagcatcttccttaacctctctaacgatcagttttctcttctgtaaaatgtgaataaaaatattcatctcacaggtttgctctgaagagtaaatcagataatctataagtgcctgccacagtgtcatccttcagttatgtctgaataatatgcaatgttgatgcaatataaccattaaagcaataaagcaaccgagcttcagagaaaataggagacttgctcaaggtcacacagacttgctgaaggtcagtggcaaaactgagacaaattaatgcctgactctcagtccagtacttctcccactttagtcagaatccattccattcccaagagttggagagagtgtgcaagaaaatgttcaaaaaaccctactgcaacattccccaaatcaacgaattgtggacatctaaatcccaacctggacccttctccgtgatgtattcacaactattcaaagcaaaaaaacctctcaatatagtctgtttgactcttaggaggggtcacagccacttaatatgactaatttggattcgaaccttttaactactgcagtatccagaaataatttattatcctgacattacgtaaaagaagaaagtaccaaacaaatattcaaactggcattttaaaatatgtcagtgaagcagatcaaagagtccccattctttactttatatcaagatgaaccagtttggaacctgtcatggagtgaagcttatctagccgtgacaggaagcaaaggttatctttaacacaatggaaaagagcaaatgaatgttaacatttaattaaagccaccggaaaagaatggctaaatacaggtcagtagtggaaagaatggtgtgtaggtgccttaaggaagcagcttaggtgagcacaaacaggcaaaatctgtgtgcagacagttgagttagcagctgtcttggtatcattgacattatatcacagttgtttgtcttcagaagagagcacacaagaggaagaggccattcagtacgtggttgtccagctgaattcgagaagccgctcacagagtggttaccagcaacatttgggagccagaccacctggcttcaaacagaagctatgtgtcacttactaactgtgtgaccttaggcaagtcactgagtctctgtcctgtactttccccttcagtaaagtgaggttaatagtagtgcctactcacgcagccagcctcggtgcgctggtggtcaagattcagcactgtcaccgcgatggcccagattcatttccccgtcagggaaccacaatacccatctgtcagttgtcacactgtggcagctgcatgttgttctaatgctgaaagctatgccactggtatttcaaataccagcagggtcacccatgatggacagttttcagcagagcttccagacgagacagaatggcaagaaggacctggccacacacttgcgaaaacatggcctcaaaaccctacgaaataacagcgaaacagtgtctgatatggcactggacagtgagaggatggtgcaaaaagactgggcagggttccactctactctgtacagagtctctaggagttggaatcgacatgatggcactaacaaaaactcgtatagtagttaagaaaattaaacaaaagggtaactctttgtgaaacacatggtaagccttatataaatatttgctaaatatggtcctgcgtcttagacccatcacttacttgctgacactcctaatagaagttgcttagcctttgtaaactcaggctcctttatctgggaaatgggtctaatcacagagcctggcttacatagttgtgaaagttaaatggcatcacatgcaacagtgcccggcatatgccagtcaaataattatgatcttaattttcacttcatcagctagattggaagacacatgaagcagatgctctgtcctgttcgtctttgaatccactttaagcctttctgtattaatgtttgtaaacagagcaaaatgatataaagacgcaggtaaaatattttataaacatgtaatacagacacattcatgcccaaatttagaacacgccctcagaagagaatcacatggacacccactaagacatataagttatgcatggaatgatactcagagaatcgtaaaatgatgaggtttgatctagtagtcacccaaagcagcaatagtctctctggcatctttgacagatggtcaccagcttctcaaacttccaacaatccgcaattaagtatttcatggagtaaataaattcctttttctcttacatcctagtggcacttttaaaaacaactctctttttggtagcagtgaaaaagtctcacttattgtggttttccttgagcctataaccattactgaatggagataaaagataagggattaccaacttatttatttttatgcctttcaagtacatacagaatattcctttgcccttaatagatgctcagtaaatgtttattggataaatgaattaaatgattagggatcccgtataatgtttccctttctgagaatgtagcttgagtgaaatatctcctatatccaatctttccttctgcttatgtataccttgtcaaatttaaaatcttgaaatctaaaagagatcaattttcgtttcctgactcaagggttgaatttagattgttttttaatacttaatattttaatttcatggattattagacctctagggaaagtcaaaagtgtctagtcattttacatattgggaatccaaaaccaatcatgagcagagcctgggcttgaggctgggtcccttgactcttgatcccacattatttccattgcaccatcccgtaagcactctacaatttacaaagctcctttaacctacaacgctgtagctttttgatctttaaatccatgctgcagaaagaacaaacatcatgctgttgtttcagagagagaaatgaagtctcaaagaagtccaaggacgtcctgcatcaggggagtaggaaagctgggagagaacccaggtcttcagattcaattcagattttttccttccattggaccaactaagaaaatgtatacaaaaatggagatctcttaaaaatgggaagagtggagaaaatgcaaagtaaatgtataaccaaagtgggtagtgacaatcaaagtcgaaagaactttgatatccactcctctcatcaaataccaagtggacaattctgaggatcagaacaaccaagctacgtgatgaaaaccaacccagggatgagcacaaagcaagtttccccctcacttaattcatgggaaaaatatttccctctacttagggccatcttgagatggaaaacaggaaaaggagaaccagccctcacagggagttgaacttcagataatttttcttaccaaaaagagaaacagatatatctaatgagcaaatttaaatcaatacatcatccctcatttcctgttatcttgtatcatatataaaactctttaagaaattcagaagaaatgtttacgaggctgcctcgtggatataatatctgacataagggtctcagaagagcgcatgattacttaccttgcttccctgcagaagtagagcctgctccccacagagtgagagccagcaggggtgtgaacagggcagttccctgccttcagaggcaggagctccaggcctggcatgcaggttcagcaagctggagatgtggatctacccaggcagaacgaattcacaacattcttaatgagccattgcaacttgactgttctcggttggaatcaaagtagagtaagctgaagttgtcttgtagatggagaataattagcaactccaaggaataaaataaaaactatgattatcattcttttctttgattcctggaatgatcccttttattgcaatgctcctctttcctgtcaatcatccagtcaataaacaccttttgaagtcccaagggcaccatgattttgaggggtttcttctgagtctcttccagtcacgcccctccctaaagggccaaggagacctgaccacctggagcccacactctgccttcaattccacattctgggtcctcaggatcccagattctcttgcctaagtcactcaagtttgctttcagggcctgcatgagcgactttcctgagtccaacttctgcatggtggactgcacaatagtatgcacagttctagcctggaagaatagccagtgttggttgactgtgaagggtgtggactgagcatagacttatggcctggagtgttcagacatatgcacgcaagactgcttactgtgcagaactgagctagggatgagaatagaggagaataggccgtcagccaagagcttccaggtatattcatgtcatggcccacaaatgtgaggaatgggctctcatcctttttagattttgcccctttgttttctatttagtgaagtagcaagcagggcacctacctggcccattatagaatttataaatagatacataggaatctgttaaagtccttggagcatgaatgaatacaatggaagaagcaccattaacaagtgggaagagcagggtttgaaagagacagatctgagcaccagactctgacctgctatttttcagatctggaatcttaaacacagattacttaacctccctgaatcatgtctctaaagtgaggcttacaattttacctaccatataaaattataggggagggtacagatgtgactggcatacactaggatatttcactcacatagaaggcattctataaaggtagttattttatagatatgaagggaaatgaggaagtaggtcttacagcatagaaaagtcctaggatcaagtggggactattgacctcagaaaggtcaaggttaattggaaggtgacacatactgaacgtcaaacagaatagatatttccgttttgagaaaatccatttgctaatcttaatacaagtaaaaagcacttcactctttttaaaaaggctataataaatggacagtaggtactcacaatttttggtattgtgctactatataattaataaaaatgtgtgagcacttaggaatcctgtaggcaccatttctgaattcttccctgacatttaatcatggtttcagaccctttttcctatctttctcctttatcatccttcatttgtccttttagcttgaatgttttcaaagcatgtcaaccccgggactgcagcaattaaaagatttgagttagctttacactacattagagcttcagtttaaaagcatattgggcaataatagatattgctagaacagaaggcttcataaagctcacataggagactgttacataggcatctgcaatctcatgtaaatcctcaaaatacatcctctagtaaaatgatgttacgtaataaaagtttacagggagaagagtatggggaaaagccaataatttggaatgagaaagatctggcctcttgcatctcagcccctctctcactgggtgaccttgggcaagtcacttaaccactcttagactcagtttcctcttctgtgaagtgggcacaatacaccgcctagctcatcgatgtgttgtgaagattaattttttttaatgtttataaagtgctgagcaccatgtctgacacagtgagaaagccctcaataatggtcatcctgaataaacattcgtatatcccctaatcattctctagttccatttgccggtatcctcctgattaagttgtatctctgtgttctcattatcagttgtagacagaagggagtgctgatgatagtggtggctctttaggttaaaactctcagtggtgagttccttctgacaacgttaaccacatggaggacgactctgggtgtagttgaggaaacacgccaacctcgagttattttgagaagtgagaataatatgattggaaaattttactcttggaatgacaaatacctgccttatgctgtaatttgggcttaatatccttacctggatttcctgaataacgtattgatattatacatctattcctgtatctatgcatctatctatctatctgtgatagagaggtctctatagaatcccatatatcattaacacttttaaaaatgtcttgcaagaatgtcttgactcctcaaatgaagttgttgaagttgtgattcctcattctaagacctgaggcaatgtatttaagttttctttccttattagtgagacagtcatatatgtgctcctggcatgctggttctaatcaaagttaagatagtcttagaacagtaaatgataaataacttaaaggaaaatggtcagaaaaatatagattgcttatacaggtttttgtttctaactagtaggatagtcacagtttaatatgtatttatggaatatttattaagcatttaatatgtgctaggcttttagattggtgttcttctggacctttctatgacttttgtcctatgactactctttaatatataacagtaataaattcagataggctgcatatcaatagaaactaaactagtatccgaactggattcgatgccatttattaaccctgagaccttggtctggttgtaaattctctacatctcagtagggaaaaggacctgtgaaaattgagagatttttctatctcaaagtgttgtgaagtttaaaagatctaaaatatgtgaaataattcaacatgttgtattgaaatcaaaataaattttcaatgatgaaggcatagattcagctctacaaaaagttatcactatgagaattcaaaagtcagtactgacatctgctaaagtgaaatttaagtatcactatgaaccagcaattccacttcaaaagaaaattccacccaaaagaaaagaatgcacacatccaccaaaagatgtgtgaaagggtgttcataacagcttcatgcataataactgaatattgggaacagcccagatacccacaacagtataatggataaatcatgatgcattcatgtaatggaacactagacagcaacagaaaatgatacactgtcgctagaccatgggtgaattgcacatatacaatgatgaaagaaaaaaaaaaaagcaagcgcaataaactacattgtgtatgattccattaatatgaagttcaaaaacaagcaaaattaatgtttggtgatatgtgagaatagtggttatccctggtacaggcatatactgactgggaagaagtatgaaggagtcacatgatgggttgaagatattcagtatcttaaagcgggtggtggttacaagtgtgtgtgtgtgcgtgtgtatgtgtgggtgtatgcatgtgtgtgcatgtgtttataaaagttcatcaagttatacacttaagatttgggtactttatgtattttctatctcagaattaagttgaataaacagagaagactatacctagtttctctgaataataagcattgagtgaaatttggtcctgtatctttgctttgcattacatatttgcagagagatagggcccagtgtaaaatgaaaatatggtccctttgttcacatgttgtcaagaatttcatgatggcaacaacagaacattaaaccaagtctgcctaccttctaagctcagggccctattgcacacccatcaggccagtcttgcacagagatgactcagaagatatccccaaaagcaagcaagacttgctctgattgggcatttgcatggtataaaacaaacggggaaaattcctgattctgccaggaaagcattttagaggttatgtgctattgagctggataactaagtcactacttgactctattgaaaaggcgaccagataaatacttagtgtggggaaatacatgaagctgagattagatagaatgccttaattaaagagggaaaaacttacgagagttatgaatagaaaacatgtgttctattaaaatgaaacatgcaatgctctccatgccaggaaagaaaggttgaaatggaacagtggtaataaactagaatcacgcatgtaccagtgataacttttgcttcactgaaggagaatttttaatagtgcatttatattactctagtcattaaatataataaaattctttgagaaatctgtgcctcctgggtggagtatttgacataagagagcaagatgaagagatcgtgaaaatacagtatgggaaacataaagagaagctgggaggcttggggctgcccaggtagctggtcactgactttgcgttcttacaagagtgacgcttactcccttcaaagtgagagccagccagctgagtgtgatcaggctatcccctgcctctcagagacagagtccctgggagtagcatgagggtacagcacactggagaacgagagtccacctgggcagaaaaaagtcacaacactcttaatgaggcattgcaacctggctcttctcagttggaatccaagtgaaggaagattcttgtagatggtaaatgactatcaaccttaaggaataaaacataacaaaacaaaagtaaagttaactagactaaataaaaataactgttattggattctttctttggtttcttgaatgacagttaatgttcccattcttatcaatgcctctgtttcctgctatactacacaataaggacctttcggagatccagtggcataaagcaagctctccgttaaattaaagtgtggggactctgagctgcttgggttcacgaatgagtgtggcccctaagatgttttgtaaaacttttcacagatccttagtggatggttatattgtcagtaggtctttcattcaacaaacatttgtaacttgaactttccaaggctttagaaggctgataacataaatgaggttttatctatattaatatttgaattaatccccacccgcattgcattggcaatcacctccctcagttatctctgggtggccgaaagggtgtttcatatgtgctcgcctgtgcttctgccctggcctcatggtgaatgctcacagctcctagagccacttggaagtcagtgcctcattaattaccttgtggaaggagacatgtgtaacaatgaagattccctggataagtgctaaagagaagagtcatacgatgccaaagagaatatagaaaagatgtgactcatgagggagagaagtttccccttaagaagtgacacttgtgctgagatctagaggatagatgggaattaactaggcaccatcagaagagtaggagcaaaagcctttggtgggagggagcctggtgtggacaggcagaatttgttaaagaaaaaatggctgctacaacaacaaccaaaaacccttaaatatcagtggcttaacacaatagctgtatattccttgcttgcatagtctcacattgcagcagggggcactgcgtcacacagtcgttcaggaaccctggctgactgagcttcctccatcttcagtgctggcacttcaacatccatttgtgcgctgacaatccagtgtagaagggcaagaggaagagcattggcgatagtatggggagttcttctgagccaggtctggaaaaggtttgtaagacttccatggtattccagtcaccctgtctcaggaacatggccacaaaggatggccaaagccacggaggaattaaaattttaagaaaataattcaaagtttagaaacttcatagattgtaactgagaccattagaatccgagactgtttatcatttgtggctgagttaagatacaggcttattcctttactcatttattcactctttcatccatttattctttgaacatttatcaggtacctacattgtgctatgcccatggtcaataaaccacattttcctgcaaagtttaatagggtagacaaggttataaacagaaatatcaggagaaatggacaatttttttcatttcacattttggataaacatttaaggagaaaaatgtaattgctcattggtgcttaaattcttatcagcacagaacaggtagaattaggggaaaagttttaaaggagggaattcattttttgcttggggaaaaaaaaacactagataaactaaaacgtgtaaaaatgtctttagtgcaattctgttgtttcattctttcaaattgctctgtgcttgtccatgtcccaggcagagttctttaaattactgtacagaaactgccccctttctgcactgaaaacctcaggagtttgatttgctttactaattgccaaagaagatgttaagacacaggtaatgactttgccatttccctttgtagttttaaaataaattttaaaatttcaatatgtaatcaatactgaatggctactagggacggatttgcagatccaaaaaattaccaaagcagaaggaaatgtgagatttccccatattattgcctatatggaatcaggtggctgatatttttctaagcataatcaggaccctgtttaaagaccatctcaatcatcaaataaatccattagcttattttacatccacatttaaagatttctctgcagacttggctttctccttggctcagctgtgacacataaagaaaactttaaaagactgtgagtaattaaagcaacaagcaattaactaattgatcctaaaagatagctgacttgacaccaacagcgttaattgcagccattctgtggagcagcctaggctgtgatcatttgtgggtcttcattgttacccttctataacaagcaaccagaccaaaaaatttcaaaaacaaatttccactggtacttggaacattttgaccttctttctgttactatctcacctctctccctttccttattccgtctacctgcacctgctcctctcctcagtcttctcaggtcagttaacagattactcatgacttgttatgggaaatcttcccttaccacctcttctgcctttcaaagaatccacttaggcacttgttctgggcttctgtagcctcctgttctgcccctgtcgtagctgggaccagttaaatgatttgcatgcctcatgagaaatgaaaatgcagagcccatgttaaaaaagtactaagaattaaaaaatggcaacatcagagcattaaatcaagcctggaggccttttgagcatggagccctgtgcaactgtatgtgttgcctgcccctgaagcaggccctgatcatcgccctgtcttgtgattgccgttgtctttccttctaaagttaaagctgcacaaagcagaaaccacgtgtaattttttctccatatgagcccctgcaacaactgcctgcctggccttgctcagattaaacatcgtgatctatatggcattatgtaacctggattcttctgctcctgtggttacatctcctccctctcgctaggtcactatcctggagccacacttgccttattgactatttactgtttaatctctgtctcagggccttcacctgagctttgctcttccgcaatagaactatatcatcctgtaaatcttttaggtctttactcaaatgttccttcctcagagaggtcttccctgaccgctgctagctcaagtagcccccaacaggtactctcctcttgccttagtttatattcttgcattgactgttatttgaatttatatatgtttgatttctatttcctgtctccgatctctaaaatgtaagatccatcagggcaaggactttgtttgtctccactatatccccaaaaggaaaaagaaaatagtccctgatactcactaagtgcttgttgaataaatgaataaataaataaatgaatatttccaaaactacttcttgctttatttatttggcaaaaatttgagaataaaaactgtttttctgcccccaaatgcaaggggcccacaaactacagctcaaaggccaaatccagccctcctgttctggtacacggccatgcccgttcgtttctgtcatgtcgatgtctacttttgtggaacgtggcagagctgactagttgaaacagagaccatatggtctgcaaagcctatttactctttggcttttagagaaaaagtttgccaacctcttacatggagcacataccatctttaaatataagaacaaattacctgtcaagtaaaatcagttcagagttatctacattaataacacaaataaaaggtaaaccaactgcaaaaagccatttaattttctttctttctttcttttcctttttttttgaggaagattagccctgagctaacatctgccaccaatccttctctttttgctgaggaaggttggccctgagctaacatccgtgcccatcttcctctattttatatgtgggacacctgtcacagcatggcttgataagcagtgtgtaggtccgctccagcaaattccaggcccgagaagcagaatatgcaaacttaaccactgcaccaccaggctggcccccatttaattttctttttaaataaaaaattctcgcatttatctgcctttaagtcaacaacagttccacaggagtctcttcagtgaatgtgacgaatcagctggatgctgtagctaactattatttaggaatggaaagagcaggaaagaggaaagaaaataattaaaaaaagaagacgagacaaaaaaagacaaaactgtgcaacgagcaagaaagatggagactgaaaggacattaaaagaagaacaaagaagaaaacagtttggtggttactcaaaaagttgaaaacagaaataccatatgatccagtaatcccactcctaggtatatactcaagggaaatgaaagcagggacttaagcagatgcctgtacagaaatgttcatagcaaccttctttacaatagcacaaaagagggaaaaaaaacaagtgtccttcaacagatgaatggataaacaaaatgtgatatatacactcaatggaatattattcagccataaaaaggaatgaaattctgatacacactacaacatggatgaaccttgaaaacattatgctaagtgaaatacgctttaaaaaaaaggacaaatgttgtgtgattccacttacatgaactagagtagtcaaagtcatagacagaaagtagagtagtggttgctagggactagggagaggggggaaggagattattatttaatgagtgcagagttgttgtttggaatgatgaaacatttctggaaatagatagtggtgatggttatacaacattgtgaaagtacttaatgccatttgtcattatattttgcaaaaaaaaaaaattttaaaaagaagaagaggagactggtaacagagatgccaggctcctctatgtccctaaagccatgcaccattccagaagaaaggtgtggagcctgagacaacagcttatggagaggccgaggtcacattcggtgtgaaaggtagaactggcgagtgatgaaactggatatttcaccggggagatttctaagccaagtgttgaaggagcaccttagttcctcttgactggttattgcaagatgagcaaaatgaagagagaataagcaaaaaggaaccaaaacttaatgatttggaaaattcttaatctgttcatattataaaaaatgagaaagcacattcagaagacaacaataaagatgtataaggagattagagtgggtgtgaaccacagaactaaccagccacccaaccaggaaacagtcagtttgaactgagggtaaggagatgagacctaatgaaggaaagctgtgaatgtgtgctatctttcaaggaaagggaagaaggaccctcaaggcaatccagagaccatcagggctacagcctaggtttcaaaagatcagacaggctctggaagctgtgggggtagagctgctcagagcctttgggcagcaattcctgcctggcagagagccaccgcttggagagcatccctcggagttgtgggggtgacattgccactccagtgagtctggaaggtagaaaatcctgccaaagaggattatttcccagcctcaagatctcacagagtttgccttgttaggttttggatttacttgggacctgtcactctttcttctttcctatttcttctttttggaatgggaatctccatcctatgcccgtcccatcattgtattttggaagcacgtaacttgtttggtttcacaggctcacagctgaagagcaattttgcttaagattaattgtaacttgtgtctcactcatatctgatttaaattctatttagatgagactttggactttagacttgagagttgattccgggacaagttaagattttggggctgttggaataagtgtatcttgcacatgaaaaggatctgagttttgggagtgagggggatacaaacgttcaatccatagcattctggtggaattctggaatgctgtggatcgaatgtttgtatccctccaaaattttttgtatctcccagaaattcatatattgaagccctaatgttgcagtaattggaggtggaacttttgggacataattatgtcaagagggtggagcccccatgatgagattagtgtccttgtaagaagaggtagggagctagccctttctctctgcaatgtgaggatacgatgggaagatggccatctgtaaaccaggaagaggaacttcaccaagaacctgagcataccagcaccctaattttggacttccagtctccagaactgtgagaaagaaatgtttgttgtctatgacacccagtgtatgttattttgttacagcaacctgagcagactaagacaagagtgaactggagattgattgaggatgagagctgtcattaataaaatggatgtaattaacctgtgtgttaattttctttgctttataattttaagtctacattaacaaacataaaaccatgtaagattctgtgcacttattttatactcataaattactaccagtttcttcaatgtaaaaaaaataaaagcagtttagtatcttagaatgtttctaaaactaggatatgacttatagtaaatctgtacattcaatgaggtatttttctcgagagaaaaacgttgagactaaattgatgatgtgcctgaaaattgatgtcatcacagaattaaagcaatataacattttgatgaaactatttacctgtaagaaaatgctgacaatacctactggtggaatactctacagttaaattcctctcctgaattgtaataaattttccctctgagtataattggatggctgcttgtaaattgtaagtctagagattcaaaatcaattcatgtccttaagaataatataaaacaatgtgaaatggatgaatattagagctatgaattaagatctctatatggaagcataaaaatgaattgtgttgagatcatgtcagtttaataagaaaaagattagaatagtaacacaaataattcattgtatgcctactatgtgacaggctttggactctctgctttacatacatccaaatagtcaaggaggagggtacaaagaaactgacaaatctgggatgaaaatattgcctcctttcaagtattttaagccatattatttgagactaacactgccacccttaaattggtttcatccatcatttaagagcctaaactgatctccggaaaaatctgtctcatctgtgagggattgttcgtggtccaagagtggtgcagctgtgtttcattattgggcacagtggccatcgtaaatgtgaatccctggtcctcatttcctagttaactagccttctgttgttacacatgtgatcactatccctcagcactgggcaatatctccctgacatgcttagaaaaggattagatgaccccactaagacaaattggcctatggcagtgcctagtatgtggttttcttgtagcataaaaagcttcagaagacctacgtccaccttccataattaagctgtacgcaattgatcatttatgaattctttccaggctccatatgtgccagcataagattccagtctcatatttctttaaaatatcatgcccatcctattgcacattttaacattccaataaacatgatttcttcttcctctgctatcaaatacgtacacaaagctctcagatgagacagtgactcagaatgccagctaagtaatgtgttatttgttcccccatgtttgtgcatgctatcaaattctatcttagttcagaatatctctgtgcttactgcaaacaattctcttttggaccactttgcttcttactgtaataaatgacaaagaaattgaatacatagagggattgcttggaaaaacgatactagcagattgaatttcagggtaatgctattatttttgaaagccacaattctctgatctaccaagatttgcctttctttcctatccagggaaggattactgctgacaaattgtagctccttttcaaaatatttgcttttttctttcaaggtttccatatgaaacctttgaaactcttaaacaaatgctgtgaggaaagagtaacagagcagctgcaccatctaaatgtaattatacatttaatttgcatgggatttggtagatggaagaatatgtaaatagatttttatctctattggccattagaattttttttttctttgaagttggtaaataaagtacaatgtcgctaggtttactttgaaagcctgtggagtttaggatgttggttgataactgtttgctaacctttctcttttggttactgttcatctttcctggtttatgattgaatctccagcacctgatcccatgtgtggaacataggagttagttgcctacccagccccaactccccttaacaaagaaacaaggagaaattgcacttagttcaaaatggtagggggagtgttgtacacactgcattcttcttgggcaatgcctttctacatgcctgaaattgtcatccaatactgctaaagagatattagacttcatgttttccagtgttaaaggtctgtgattggcatgtccccagatcatttagtagatagtacttaataaaagaaacaataacaatataaccaattaaaagtactaagaaaaagccaaaagccctccccctactgtgtcctcttgctgggagaattgcagttttagaatgagcaaaattaatattcagaagtgtggaatggtcaaagccattaatactggcagaggaattttgaaatcttctttggtactcttctcccatatttcttaagaattgtgtttcctcacaaagatcatattaggttttatttttccttcaatgtttaaccataggaatgaactacaaagttgtgggcattcaggcacatcaatggtttgatggtgaacatgtttgaatcttcattggtgtagctgagggcataaaatgcaaaaagaattgcaaatttcagaaatagaatgaagaggaaagtgaaatcgctaaatttaatgttttactagacctctggcatttgaataaagattttataaacctgagtaatttctaaaagtgtaacttctatgaacatattttttctctctcaagtggtaaagaattttaaccaaagagaatagaagaattgaattaactgaatttcagaaggagcattttcatttccacgtggcaggcatttgtgtgttttgctttcctatgtgcctatcatgtgacagcctcatgctgaaggaagcactatcctggtgaaccatcactgggcttttaaaacataaagtatattttgtacacaattttatgagaagcatttttatattactggtagacataaattcctgctagcaacaacacattttgtccttcaaaatattaattgataacatggatagagtcttagacatggactcttagcaatattacacttcatttactttatatttgatgctgtaagatgctttctgctgaagtttagaagggatcaggaagctggatgtagatttcaaaaaggcatatagatggagttgtgaagtgtgttggagggagacgcctttgaaaggcttcattattacctggtctggtcctcatcatcacattaaataattaattctccatgtatccactatgtaaggatcatgatattgatagtaattattatgaaacagttggcatgtatcaggtacaatcctttgtgtttgatatacattattcttttactcttcacaatagctctatagcataagcattattctcctcattttaccaaagaggaaacctattagagaacttaacaattttgcccaagtttacagcttgtagggttttatccagattcaaatccaggcctttctaagtccaaagctggctccttaccatggcctgttctgcctctccaaatttttcttcaaggtctactaagcgcccagctcctttctagattctaaggataaattagtgaacaggcatgactcccgcccttagagatattgccttctagtgagtgagttagatcggtaacaaataactctatgagtaattcatcgttaccatggtttggtaatggttaatgccatgaaagagaagtccaggatgcccgaccaggaggatggcattcaaaggagacagaaagaggtcctaaaacacataaggaggggtcagagttacatatgtcaacagcctatttttaaacttaatttcaaaagtcatcaattcaaaaatattcttttcatcatgtgtgtttaatttgctgaaggctgagctgaatttcttagcaattttctatagataatatagtcatatattttagaaacaagctaacataagaaatgtgaaatatactatattgttattgtaacctttatcactttttcatgccagtggacgagtgggcgaagccatacttcaagtcaatgtcttatctgattcaactgcttgtttgggacttctggcttgtggttccttgctgctgggtatttagtgttgaagtgagtaaaagcaggatatgattagtcaagaggtttttacgttgaagatttgcttctcccctgctgatgttttctttgatccaatacaaagctgtccccttttataaaactgcatctgtggggcaattgcaacaggaattctttggagcaatgttgtcaccactcaaaaatcatgatgaagataaaaacctaacagaattgttaaatgtgacaagcctttcctccacctggagaggaaatttcctggctgccaactacgtgccaggtgctacatgattggtaaaagttttctcattttactgtcacatcaacccaataagctgggaattggtgggaattactgttgtggtacagtagacccacttgacagaaaagaacactgcgcttcagaaaaattgagtgaatttctgacagtcaaagtctagtaaagagtatagtcaggcttcagttctggggctgttgggctacagagtctgtgctccttccatggcagccaggaggtcattctgtatttgctgctattttgtctgaggccaattagaaataggagaagtatgttgtcaggatggctcaagcatagagagtgcatgatctgtagccagagctaaaaacttgcagaaggaaagaaatactagagaatgaataaggaggatctaactaccctaatgccagtcatcaggtgctggtaaagattgacctacaggcaatgtgttcctgacaaaatgcttctcttctgttcttgtgagtagtcagacctctattaaatttctcactcagtttcttctgttcctagcagaagacaagcatgcgtatttaaaataaatgaaaatgaattttaacaaattagatagaaatcttctcaaggaggatgaatgagtgggtttctgccttaaaggttatgtgctttgcaacttgccatagtctctttaacgttccttggcccttagtaaatatcagtatctgattatatatttattacctcggccattagaaaatccatttgaatcctacagtctgcaatcatacatggccagcttccttggaatttcatatatgtttagtttggaataaaaaacttaaatatacatataaaatagctgtttaaaaaaataaatatcatgctatggtcttgaggattgtcaggaatgggccatacgttcatgtaaatgataactttgacttttattggtttcagctgagctatcccttagaggtgtaacaaaataaatgaattacttattgccatattgcccagaagaaaatgaaatgagaaaatatccacattgccttaagccaaacatatggagtctagaaaacaataaaaagcccatgctaccataaaatatgatgtttggtggctgctttttccaaaacctgtcaagttgggctattaaaaaaaatggattgagaaaggcaggaagaaaaattgtatattttatttaagtgtgtaaagtggtgctagtttgaatattattgaaatccttctttaattattgcatttttaaataagattaggaatttgaaccaatttcacttagagatgtttgataaggtgctatatactcttcaggagaaattattttatctgcattatttctcccttactccattagctctcttctttgggtcccctactctctgacataatgcagtggctctgctgccacggtaggaactcttgtggaaatatttgtaagtgttgctagatgtgtttcagtgcaaggagttgggctgagaaaagtatatacagctgtcataaatcattgattccttatgacaatttggctgtaatctctaggataataaaagtttggagccaaaaattcttgaaagagtaagagaaaagcagagagaaaggagagaagggataaatattttttaaaaggatactgaggatatatacttgaaaaagtgaacacatgagcaggatagaggtggatggttattcacttggaaatcaggattaggctatttgtgtttgaaatcaagaaaagagcccatcttttaatactggagatgagaaagaaagtctatgttttaagcctgtgttgaaatatgtactcagcattgaacaagtagccgtgtaggaaaagggtcagaaatgaagaacagtgacaaagagcttgtgctcagccagtggaaatgattctgtctgatgctgcttcccatggctgtctcctggcattgcggatggctggtgtggacccatttgtcatttgtggaaatgggtgaaaagggagttaaactcctctcaaataaagaaaataaactggaagaaattttcccctaaggattagttggaaaggtccataagaatgacaatgataatgattaccttttaccgagtgctcactcagagattggacatgcttccacatctgcagaacctggtagggcttgtatttctatccccatttcacagatgagtaagtggaggcaggcaaaagcacgtagctattaatcagggaggaaaagtagaagaagaagatctcctgacacaatggcaggtgaatttccaaaggaaaatgtaaagattttgcctggagccctggaatccttatgaccccctgagaaaaataaaagctttcctaaaatgaaagtcttagtcacaggaagatgaagtttgctcccaaatctgagcacaatttgaattttagagaaaaccaaacgttattttaaaagtctaaactgagtgatgtgtgtcttacataatacttatgtttctggaaattatgctaaataaaaaagattttgcaactcttggcacttttgtgtataataaaattgcattttcctatttggatgtgcttacctagtaccacctggtggcagctaaaaatatttcaggaaaggagaagatcaaactttcccaatttctcaaattccaacttccgtctcaggaaggacatgtcaagcactggaaatgtgataggaccatgtgtgctaggtggtttgaactcagtggagagctagcactgaaatcccttgtcatggtgccgatgccaagaatcaccgtactgtttattaagaatgcattttcagatgaaatttctttagccataattgaaacatgtttatttcttgattctctttctccatcattccaggcattgctgcataagatagctgaccagcagtaggaatgctaagtaaatgatagtggcagagaacaaacctaagcagaacatacaaaggtgttaaacctatcaccttggcctcattaatatcaggtcacagttaattgtgctaacaacactttccagtctcttctccatcattatgtaataatgactttcttttcatcactggcttaaattgcatttttagatctagtcccctgaaaattttttatcttcctttaggcactctcctataaaatgttcattcaaacactattgattgaatatccactactgccaactgctatgctagatactagggatttaacattgaactacagggctaagttcctactcatagatctaatcgaggagacgatcactactagtaataatttatgtagtactatcctgtttcaggctctgttctaaatgatttattttgattgattcacttaattctcacaacaaccctgtgaggtaggtactatttttatcccaattttgttaatgaagaaattgaagcacagggtaattaagtaactttcccatggtcacccaaacaataggggctagagagagttttcaaacccaagctgactccagagtctattcatatcactgctctctaatgcctctcaataaccaagaaaacaaaagacaagaatgctaataaacagatttataataatttataacagcaaataattattttgccatttataataattttaagataatttacattagcaaaatgactataacgaaaatcaagtataacaatgatggtctgggaggagagacatgaggagaacagagggggctcctctagactgggtggccagggacatctctgaggacatgaccctacagctgagttctaaataacaagagagaatccattctgcaaagatcagaagggaagagcctcccaggcagaaagaacagcaagtgcaaaggcaagaagaatgtttgagaaggttcatgaagcaaaaggatggctctgcagttgaagtgtagtggacaaggacgtggaggagatgaaactgaataggtagcaggggcctgatcctacagagccttaaatgcaaaggtgaacagtaagaaaatgtggtctagtaccacaaagacattgccaaggcctctgaagaaacccattctaatgggcaatgagaagtcactgggtaactccgagcaaggaaattatatgatcccttccatcatctagattgcttctgctggagtgttttcccctgttgactgtttctacagtatttctcaaggtattcaccatgtacataggtgactcgcatctaataccccaaatgtccttggctgcttctctcagggaaaggccaacagtcttctttcacttgactgcttttccagacattcttctttctaattggtctgactgtccacttacagcatccaatgtcagtgaaggtatagccataattatacctcctctgactaagggctacagcagaggaattccaacagtgctaaaagcaaatgaaatcatgttttattgctagaaactggagactgtttggcatttagtaaagcaaatgtttgacccaagggcactattttacccgtgttaatcatgaatcttttctatgtttgttttattaagtttcaagattttaccatctgatgaataatattcccacagtgaatgttaaagtcccaaaggaaagaattgcagtatatgtagtaacggtatgtaatgaacacagtgaggtcagaagaaaagctgcctagtagtcagagaggagcagggcatgtgcttcttcagatacatagagtctctgaacttcctcagtgttctgcatgtaccagccacgtgtgcttgacttaggcttacttgttagattgaaaattccctaaatggagaagttttatagttttttattattacaaaatcaaggatgatgccttttgatttataaggtacatgtggttagtttggatgggtgggtgggtgggtgggtgggtggatggatggataggtgagtggatggatgggtggatgggcagataaatgagatttcaaagttcttgagagtagcgtgcagtctagataatgctccctcctataagggaaccttggtgatgataagaccagatgaggtaacccgtgatcaggaactgaaatatcactgctaatcagtcttaagagaggctttggctttcatgtttaaagaatggttgattgttagctctcttgtttccaagtgtggagccaggcaagtcaagggcatttaaccaaatgatattaattgaggacagaacttgtcaacctagcctaatcccctcttagactggctaactctataggtctcagcttagccgtctttatgtctaaggcaggatatgtgtccatcccaggtgcctctattgcacaagaatatactgtaattgctttgtaaatgttacattatttcaagttatatcctcagtgtttgaaacctagtgtgtactaaaattagcaaagatattgcttcttagtgagatgaagtgactgtctgcctggagtgcaaacttaaaacagatccttcccttccagtataagctttaaatatatccttgtaaccaggagattaggatgttagtatctagtcacttttggttagtattgtattcactacataaagataatacagatagaaggagagagagagagagagaaatagatagattgatgaatatttgcatttttgaatgatagcggctatctgcaaagatctaatacaatcattctttcctaatttgcctagaagtgttcaaagtaggagaggaactggggaacacatggaggagagaggcctggaacttgccaacattacctgtttgtctctttattgaacctaaataatcaaatcagtaaaaatttgccttttgaatatatctgtaaacataagggttatgaagtatatccaaaatgattaattcatactcatatgttatatatatacacatatatatatgatttttgttttgtcttcatattctcttctaagtgacacctcatttatttttttgtcttagctgtccatctatgtaaggtacaacctatatcaactacctccgcttctttcctgctcatttactcttcaaccatacaagtgtggattttgttttattagcactttgttttgcaagttttcactagtaaatatatatattactctttcatcataaaaaatatttttttaatatttctaaagtaaaactctaatcatacaggtatttatactatttgttattattgtaaatcaatcctttattcttatttataagcaacataaatgaaaaggtactattggggggccagcccgctggtatagtagttaagttttcatgctttgcttcggcagactggagttcatgggttcagatcccgggggcagacccacaaactgctcatcaagccatgctgtggtggcattccacatacacaacagaggaagattggcacagatgttagttcagggacaatcttcctcaagcaaaaagaggaagactggcaacagatgttacctcagggccaaatatatatatatattattgggattctagtcataaagtctggaattggaagtctaattcatgtaattaatctggaattaagttaaaagcgtttaaagtttgtttatggattttggaaggatgcagaattcagatttatgagagtgtgggtaattgtgtttttaggcacttattaaaaatggtgtcatcataaacatttcagtatatttgtgttctttgtggactagtgcttgagtaattagatgcaatggaaagagcacttggtttcttagcagactattacaagcccttgatggaaaaaatatttattgcctcaacagtctcctcagccaccaccatcattttataacctcattgacttgctctgtactttgcacaatgtatgacccacaatgagggctccatgaactggcattaggttgaaaagtaaatgggaaaaaagaagtggaggtagatgatgtagactgcactttaaagagattgatagccaagagaaaaaataaatgagctatcctttggaagaagacacaaggacaagcaagcgtttataaagagcattgttttctcacctattataaaagcagcatgtgtgtcataagaaatttagaaaatttgaagaaccacaaagaaaattagttacccataatctgacaagtagaaataacattctaatcttttttcaatgtatacactcacatgcgcacacaccacagacatttatatgattttttaaaaaaaaaatttagatatttacccatgactaaaaattttcgcataccatttgttaattttcaaaaacattccatcatatatatatacaggtatatatatatataccctaatttatttgaccaacctatattttttactatttgggaattttccaatgcttgctattatatttctataaagaatacacttaagcaaaattatttggatatatctctatgatttccttaggattgatttaatggaagcataatttgtggattgaatagagctaaaactacattcaagttgagggaaatgaaccagggtgagcagaaagtttgaagctttacagagaaaaccagagggtaaataaatggagcaagctctagcggaaggtgaaatggaaggggaaacctcgccctgagaaataaatctttaaaaggatctgggatccacttcctctaagatagaaaggaaaagggaaaggtggtagaaaatatagatgtttgatgttggaagaaaaaactagagggagtcctcctctgataatctcttttctcagtgacacaggaaatatgttcatctgatgagaatgggaagttaggaatgcagttgaggacttgagaagagaaaaatttagaacaacccgtttttggtggggaaagtaagcaaaatggcctaaataccaactaacattttctgaatcgcaatcacatgacaagattgatgctcaggaatttaattgtattatttcccttacttctctcaccagccctgaaaaatagaactatggatgaagaaattaagctcatgggacctcagtaaatattaaggacacatggttatgatacccagaaataaatctagatctatgaatcccacggctcttatttgaagtccagtaacaataatggaagtgacatcagatgacaccaggtgacacctggaagcaccatcctcaaatttgaaaggcactgctctggacaagaagtgaaacagcaacaataaaatcttcacttctatcaatatttatgtttttcataatagagaaacaggtgaaagaacttgcattgactttccagcaaattttctaacttataattgcatatataataaaaattaagccttgaaactgccttctgccctttaagcccccccagactaaccaccttcattaagagataggaccttatttctaacacagataattaaaatacgttgtaatgaagatggaaattatagtatcttatgctaagtaagtccacagggatttgtggctgaaataggttgaggatttaatagagaaaagatgtttttgataaacctgcctggagcatgctaatagataggtcttgttcaagctaaggttcgcagttgaatgctgaatttaatttggaaaagtataatagtttgtgaagtgtggggaagttaatggaaactttgttaaagtttgctttgtagatgtgctataattttaattcagaaagtagtttttaaatattcactcatgcatttcatagctgtgttttaatccctaatatgtacaggtgtatgcaaggtggaggatcagagagaagagatgtaaagataaacataagcttccctgcgcttgggaatctcacagttgtctgttccccgtaatgtgtggtctgataagacatcatgtgcataatttgtgcttaaagcattcttattgaactggaactctaaagaactcaatcaacagttctgcttttcaaaatttagcattctaaaagtgctgaggcatcacaaatatcttccactagattgtattctctgtgaggtcaagggtcacttaatttttgctctacatgaaataatgtttgcatacagtaaacactcaataacatgaataaataaaccaattacatcactcatcctggcccaggatctgtaattcccaccactgaagtgacttttttatggatttggaaattatctagaaaatatttgaaattatttggaaaaaactaaggagagaggttgaagtcaactcccctgaaagaatgtgggaggatttttacacattgatgagagctaatgaaaaattactagaggacgatagggggatggtaggtcaatgttattaggccattagtgtttactagttattgcttatccaaggtagtctcctatagctcccagagaccagaaataggggtcctatctttgttgatgattacatttcaaggggaatgtaatcaggtccctgagaaagacatctgtgggttgtagaagatttacatctcaaatggtcagagaaagaatttacaatctcaagttttctaaagtagatgctctaagaaaagggagctcaggagcctatattcaagaataaacttgtgtaatgtttagtcgaggtgaggggacattcagtgccctcatctgtaaagaggaggtaaagtaatcatatcttaaggaagtttttgaaaattacattggctaacattactaatgaatttttatacacggaacctaaaatcatgcaaatatcctataccagaaagcctatgaaggctcatcagttgagactagcttggtcaaatgggtaagtgaaataaagggtaaaactaatactttatcatgtgtaacaaatccctaataaatgacaaacacctacattatttctaatcccctacaaatttatcattattctaatttttcagagaaacaaactgagtctcagaaaagttgtcttttttttcaaggtcacacactagcagagggttcagctgtgattcaaccacaggactttctagcctctaagctcttgttttttctaaaatactgagcttcttctctgaaactttatcaggcctaaggccagagaagacccacgtgtatagtagccctgtccacaaaactgagaggtcaactttttcattattttgttcccgagttttgttgactggagatgttaaaatgagaggtggaaattgagtggacccattgattggacaatagagccattcaactagctgccaactaaaagttataagggtgcagtgtgacattttctgggacaggccatgtgagcacttaaggacatcagtgccccattagatggaaggtaggtgaccttttctttccttgtcttctatacttggcattagcaggaaaggagtggagtgtgcagtgacaagaaaagctctccgacataagcaggagcattttacctccttgggcacagccaggcaggaagtattctttgagaagccacatacaaagtaaaaggttttcttctttgtttagactgcagcatgtgactttctctctcactctgcttatcaattcaagaaaaacctattcaacaattctgccggagatgtgatttaggaggtgaactcacccagctgaggtcagcagctctctgcagagagtacaggacctactgtcacaggcttaggtttcaagctactttcactaaaatgttctgaccatgttcaaagcaattttttttttctcttggcctcagtttccttcttcatggaaggatgtaaagtaaatcattcctaagattggtttcttacagttttgtaattgggattctagggagctgtctaatgaatgttccttcctaggggccttttgggaccatcccattcaggagagagccttccttttctaaactcccatcctgccgactgtttgggcctctcagatataccgtcctgttctttgtttgtgtgggaggcagcctggtgtggtggaacaacacccagagacaggcagatctgtgcctctatgctccatctgctgctcgctacttgtgtgatgtggaataaatgatctaacctctgagcctcagtctccttgtctgtaaaatgaggtgtagtggatattttccaggtgttttttttttttcctgcctagcactttaaaaatgtctttcctgtcattggggaattcaccatcttataagtcttcctttgcaaatttaaaacacaaactcacttttccagcctcccttgcagctagggttcagacatctgactgaacctgccaccaatcagatgcaccatcacaagacttccgtttgaatataaggaaacagctgccactaagaatgcattttctgacaagggtggtgatagagttgctcaggttctaaggagaaaaagcattggggatttaaatgtctggcattagttgcgcaagttgtggtgctgttcccagcagcagtcctgggggcatgtgcattgaacctgaccaagattcacccaagaatggtgcttcagctttctcagaaattctcagaactactgaagatcctttaatgaattccatttttgctcatactcaccccagtggggtctgtgtttacaactggaatctgtgaccatttcatttgggtaaacccatctatggtgtaaagtcagtttgaagattaaataaggtcaataatgcactgaacccaatacctgggacagagtagaggctttataaatggtattgtgttttgctatctttgcacattcaatctcctcaaataaatggagggctccttgcagaccaatatgcatgctctatcaaggcatgttgagtgattggaggacatcaaagaaacattcatagttttctttcccttagggacattacatctcagtaggagaggcaggagaacatgagctcatgtgttagattatctgcagtgcaatccattccttacagctcttagctctccctctaattttgcaatataaggcaatcctatatctatttttctctgtaaaataatatattagttcctaccttatgtggtttatgtgaatattaaacaagctaattcaattaaaacattcagaacagagcctagtacatagtaagggctctctagatgttggctcttaggaaagttaaataactatgctaagttgtatcaatgaaatgctcagagtgagcagagcaggaattctcaattgcccaaagaactgaaagaaagccttgtaggaaagttagccagctcccaaagtctcagacactcgtgagagctaccattaagtgagcctatactgagagccaagttctctaatccccttgcacacccactatcacatttattcttcccaggaaacgtgaagctaatgatgactattcctattctacaaatgagcaactgcttggtctcagccttgaaagaagaaaggccagggctcgaattcaggctttctgaccctaaatctatattcttaatccctacactgtgattttgtgagagtcctgggttttcctgactaagtgattctgaataaagttttatcgccccaaccccttctaaaagcacatatgtggtctatggaaacaggttaacgccaattattttagaaagtgtaaagatttggaaactgtccactaagagggttcatgcctgggtatagctagccaagagaagcacagctttagaactctgtctctaatgaagagagggaatcctctggcagcacaaagcaccatttccttttgcagaatctgcttttattgagtctacacatagatcaccatttgtctagcagcttgttaacagttgtcttaggcaaatgttgttgacaatttcctactggataggactcattttctcctttaccccaccagtttagataaaactcactttgctatggatacagttgaatttggccttttaaccacctgaaagcataattataagtttgcaaaaagaatcaatagagaaagtggacttatttacgtagatttatttgttaactcaaacccgaaggggtcgatacctccattgttaagggcaattgaattgaaaaacattaccatctctcagaattcaaagctaagggaagcaaaatagttggcatattaaggtaaagcttgttcctacttcataacccattttccacttaaaaattaaatctaatcttgattatataaagcagttggagatataggaaatgtctgacacagggaagtaaagaagaattagaacggtgaatcaaacttccatatctgtaaaagtggaaatttattttttacatataaaaaatgcatttcagctgatatataaacaatagatatattatcataaatatccctttccatagccagcctagcctaggaataaagagagaccctgcattcttgtgcctaagagtcctttccaggtataggcacctctctccggtgcacctgaggctgacagtccacagtaaccatcaaggtgcagaagatgttggatagaactaatcactctccatggagggctgctaaggtcaggaactcttggttccccgacaccacctctaagactctctttgtggttattgcccccagggataaaggattcctgtcaacaccatcccatcaccaaacatggctgggataaagacaatgattacaaataagtaagatgggattgctctagtgtatgatcctaggctgtctgtctgcctgcctgccttgtttttcctaaaagaaacatattgctcttctcatcaagaaaatggacaagtgagtccctttaggaacaccctttcttaaaaaaacaatcatttgctacctggaaggcaaggtggtttaaaggcagtccagctttgaaatgataatagctacagactgaggagacattgatttacagaggtcattgaggtggcttcatcaaagtaccagcagccttccccaggaccatgaatcactgcataatttctatccaagtactttcctgttcacaaaagaatataagtgagtgcaattgtcagtaagaactggaaatggcagttcctcatcttcgccacctcggtctcattgttaatcttagagaagtatttagaagcgggaggtgagcaagaggactttcattttccattctgctctcttgggtataatttgaatttttcttaggcataagcatgtaatccgtgtataatttgtaaatatgcattaaataaaagtgactactgacggccaatggctgacttatgtttgaggggcaacaatgctttgaaatgtcaatggtaaagaaaatatcagcaaataagcatgtagcagacaatcggtttatgtccacacaataaaaaaaaaaagtgaatttctagccctgggaagtggaggggcactagtaattgcatgccaaagggatctctagttctcatgcaaagggttcggtcagttatgggaagcagagaatttaatgaatctgtaatatattttgaatcgggaaaagtcctaaataataatcccttttgttttatatttttacatttttaaaattaagatatattgacatacaataaactgaacatctttaaagtgtttaatatttttgatctattcatatacccatgaaataattcgagtcaaaataacaaacctttacatctaacaccctcaaaaattttttcatgtttcttagtaatcactccctccttgcccgccccaccaccttccccaggcaaccacaggtatattttctatgttagtttctttttgtttatgttagataaataggatcatattgtgtgtatccttttatctggcttctacattctgcataacgattttgagattccttattgtgtgtatcaatagctcattcctttttaatgctaattagtattccattgtatttatccattcactccttgctagataattgagctgttccagtttggagctattgtgaataatgctgacaggaatgtttgtgtacaagcctttgtatgcctgttttccttctcttgagtaaatccctaggcgtgggatgaatgaatcatacggtatataaatgtttaatcttttaagaaacagctaaactgttttccatagaagttgtacaatattatgttagcagcgtatggaaattctaggttgctctacctcctcatcaacacttagtataatcggaattttaattttaaccaatttgccagaagtgtaatgatatctcattatgctgtgaatttgcattttcctaatgactaatgatattgagcttcgtacatgtgcttatatgccatctgtatatcttcttggatgaagtgtctgctcaaagcttttgcccattctttaaatagatcgtttgctttcttcttttgacttttgagagtttttcacacgttctatatacaagatttttcattctattttcttctatcagtgtccttcaaagaccagaagttttaaatttgacgaaacccacctcaacaatggatggatgtgttttttggattacgtttttttggatcttaatccaaaatggattttggattatccaaaattttcttttttaatggattatctttaatggattaatggatttcatttttgttctcatacttagaaaaatctttgcctaatctaagatcactaagatgtttttccttgttctcttctagatgttttatccctttagattttacacttaaatctgtgatccattttgaggtaacttttctacatggtatgaagtaagggctgaaggtaattgttgctatggatatacaattgttttagtatcatttattaaaaagactatcttttctcaattaatttacttgcactgctattaaaaatcaatttcccatttattccagggtctatttctattccattgctctatttggctatcgttacactcatgccatactgtattgataattgtagctgtacactaagttttgaaatcaggtagtagtattcctccaattttgttctttttcaatttctttggttattctcgattctaaaatttccatacaaatttggaattagcttgttcctttctactaaatttttttttaaaaaaatgaaaccttctgggaatttgatttggatggtattgaatatataagtcaatttcaggaaaatttaaaacaattctgagttttccatttgtaatgctattataaataatatcattttgcctcaatttcttgtttttcaatatcagcatgaataagtgcaagtgatttttatgttggtcatgtattttgcagttacggtaagtccagttcttatttctattagatttttatgcaggttttactggaatgtatacatagacaattatgttatcttcaaataaagacagttttacttcgtcatttccaatcttgatagttttatttcttttctttttttttctgatttactgggtagaaccagcactacaatgttgactagaagaggtgagagtagatgagtagatacctttctcttagtcctgatattagggagaaagaagtctttcaccattaagttagctgggagtttttcaaagatgtttttcatcaagttaaggaagtttccttttgtcctgttggctaagagttttcattaggagtggatgttggatgttggagttttatcaaatcttccttcagcatctattgagatgaccacatttttagtgtattaatttggtaggttagagagattgattttctaaagtgaaaccactctgcatttctgagataagccccactgaatcattatgtattatcattttaatatattattgaatttgattagctaacattttatttagaatttttacattgacgtttattggaaatactggtctgtagtcttctttcattgtaatgtctctgactgggtttagtattggggtaatgctgacttcatagattgtaatgggaagtttttccttttcttcagttttccagaagagcttgcttagaatttgtgtgatttcctcattgtatgtttggtagaatcaccagtgaaaccatctgggcctagaatattctgtatgagaaggtttttaaatacaatttccatgtctttaatagatatagggctattcagattattattattattttttaatttcagcttgatgtaattgacaaatcaaattgtaagatatttaaagtgtacattgtggtgacttgatatacgtatacattgcaaaaggattacccccactcagttaattaacacatccatcacctcacatatttatctttttttttctggtgagaacatttaaattctgttctcttagcaaatttcagttatgcaatacggtgtttcaactgtagtcactatgttttacattagatcctcaagccttatttgtcttataggtgaaggtctgtacatttttacctgttatgttttcaagttcacttatcttttcttttataatgtctaatctactgtattttacatctcaaacgtggtttttatctttaggagcatgcttgatctgggtctttttatatctttcatgtttctacttaatgttttgaaaatatagaatacagttataacaactattttagtcttacctgcattttttaacctatatggcagttctggtttggttttgatggaatgattttattctcattattgattgtatctttctggttccttgtatagaacctggtaatcttcggacatcaagtattgtgaattttatatagtcatgtgctagaatctttttctgcttgtaaatattcttgagttttattctagaattcagttaagtggcttagagtcagtttgttcctttgggtcttgcttttaatatttgttagctaggatgagaacagtattttgcttatggtaatagtttcctactcctcaggcaagacctttctgagtattctgcgtggtactctagggcttcattaattttgtggcctctcaatctcacagttgagagaacagccactatgcctggtcttgtgtgagtttggagtactgttccctctaatctttggatggtccttttcccattcttgagtcacttctcacacacgtatgatatcagaactctgatcaataatcaaggggatgctctgcagatctctgtgtgttttctctgcccagttctcttttctctggtactctgtccagtaaactctagctgctgcatctccccagactctcacatctgtctcctcaactcagtaagggtgcctgagttcccatccctgcactactgcctgaaacttctttcaaggtaacaatcttggggctcatctcttttgttctcagtgtctcagagatcactgtctattgttgcctgacgtccagtgtcttctacaatgttgtgtaatatagtttacccacttgttgttgttattttctgtgggagtgtaatcttatccttgttacgccatcttggtcagaattagaagtgtctaaatgatgatttcttttattatagactgctgggaaaaaataaaatgaaatggagtatattgagcacaaagaggcagaaatttttgtctattttgttaattattgtattctcagtgtctaaaataacatctggcacagtaaatattcaataaatagttattgattgaattaaataaccatctactacatacaccatcaatgagaaaaactggggaaaattgtgttatacttggaacaaaatatcaaatcctagatcattgaatccctcaaactaaatggtactttttaagtgaaatgcacattaccagttagtaatgcatattacctaggactgggctttgtgaacatggactacagaccttaaaatgtagaattttagaatttatttctagcttataaaaaataatagcaccaaatcttcacaaatctatataaaaggttgatgatactgggtaatgattaagagcatggactctgaaatgaaatactatgtgatctcatgccagctctgtcgcttagtatcttagagaagttatttcatttccccaaatcctattttcatgtatataaatggtaatgctaataacacctattgggttagtcagagcaggccagattgcattcggaagtctcaatggcttaagaaaattaatttatatctctcatttatgtcacagtttgacctgtgtcaggtggctctcctgggtagctcttttccatgcaatgactgagggatccagagtgtctccaactcatttttctaccatcccctagaatctctttggattctacctctagagctgccacatttagctggctggcgatcaaagaaagacagtaatgagcatctcttgcactttcctgaccactttgcccccagaagtgataaacaacactcttgctcatatttattggcaaaacccagtcacaagacttcactaaaatgctatggatacaaggaaatgcaattcctgactagacagctttttcccagtaaccatttcgcaccattgaaggtgagcctgaaacttttatgggcagttgggcttgtctgccacacttacctcatgggattgttatgagaattaaagagaaaatatacatagagcacttgagacatactattctcttaaaaattagggagatattattatttttgaattgataaattgatctggataaattcatgaacatttagctacaaattgagttctgttgttacttatttattgaaaatgattaggaaattcaactaaatgatataaaattatgccagaagatagataattttctgagcttgggagcagtaattgttctgctgcaataaatgtacaatataagaaataacatgtaggtgggcaaggcagctaaaaatagttatggaaattgtaagaccagagatttattacatgtatgtatatcaggctgctccttcctctcccagtgcttacatacacttatttaacaaacattggtctgcacgttctgcccctcactgtgttacatctctcagaatcaactttttctttccactgtcatttcaaacttagagcttcagcacttcaggattatcagtatggagcttccatgttcctgtccagaacacattgctaacaaatgactccttctgaaacatggctttcttatgtcctccctgggattaagaacctacaataactctttattaccaattgaatcaagttcaaactgctcaggctgccttccaggcctgcaatcaactgtctccgcctgatatatcaatgaagtaatacttatcaaaatgttcttccataacctccacagcaaattcttcacttcaaccttctcttctaaatgtgtccttgcaatttgctcccaaccgtatgcttttgcttagagtattcctcctcaaaagaatgtcttaggcagaggcaatatgtacagttccttcaagggagatttatcagctagaatttatttgactgcatataacagaaaattcaaagtaatagtaactcaaacagatggatattaatttctctctcatataaaggaagtctcaaggcaggcaaaaaagggctggcatgccagcttcactaacatgaggaaccctcccatgtttcttttccacccgcctagagcagggctcagcaaattacaacacacaggtagatctggcctacagactgtttttgtagggcctgaaatctaagaatgtttgttacatttttaaagaattacaaaccaaaaaaaaaaaaaaacaagaaagaaaatatgcaacagagaccagatgtatcccataaagcctaaaatatttctctcgttcacatatagagtttggtaactactaccctagagcatggtttttattcataaggtcacctcatagtcaaacacagttgttgcagttccagccatcattcttacattccaagcagcagaaaggagaaaagaggaatgggcaagaagggcgtgcctcccagctgaagcagtttcctttagggagcattcctaaagtcttacatatcacttccttttacaatacatggaattgaatgttaccacatggccaaatacagctgcattgaatctggaaacatggagttttttagctgggaacattatcactctgaataaaactggcattctattattaacaaagacagatgttggataggcaagtatccatctctgttgcaggtctgataatgactctcttaagctctcaagtttgctatttcaatatcagtaaaataagagtcccagcaccagtgaatcatacaatgcttgtgcaattaaagtgattgtaacatagtgggtcgatcacaattttgaaatgaactgaaagcacaataattaatgactgttcagcatatactttgagttccattctactttgaatttctgtggtcctcatatatgaatatgcatttgctcttgccgaacagccccactgtaccttgagctcctttaagggcaaggccatatcttagttatcttggtgtctctagggcccttcaactgttgtcgagacaaaattgagatttggaattttattttaaagtaaatctactgagtcaccttatttgactttaaaatctatcccataaggaggaatatgcctcttcactaacaaataattactgagcacatactgctggctaggcaatgtgctacgggatacagcagggaataaaacagacaaaagtccccactgtcatggaacttacatcctagtgcaatgagagaaacaataaatacataaataagacagatatactttgtgttagatgacaaatgttatcacaaaactaaagcagaataaacgaatgcaggagaaggaattttatatgtatggggggggcgggcagggattaacaattttaaagagatgttcagagaaagcctcaaggactaggtatgaagaggctaaggaggaagtgagacagacccgtggatatctaaaggaagattacttaagacagtgaagatgttaaacgcaaggctttgaacaggcacatggtggacatgttcaagccatggcacagacactgctaacatgatcagaggaaaagaagtgagaaaaaataaagtgaaaaattagcagttgatgtaaaaccttgtgagtgattattaggattttgaattctactgagtgtcaagggaagccatcggaaggttttgcatagtatgtatgatcggctgatagttcagaaggatcactctgattgtcacggtgagagtacagaggtgtgctgggctgatgcagggagtcagttgggagctcttgcaatgatctgaggagagtccatagtgtctgagacaaggtggtggagatgcaggtgctgagaaatatcacattgcagatatgtagttttctatattgtttgaatttgaaatcaaggagttatttctttttaaaaatgagagaatggacagagagtagctagagacagtgaatatagacacagtacttagggtgacttgcagtactgaggagtaaaaaagtgaggcagtaacctggaggaagatgtagggtcaagacgtccctaaattttattttgttttcatatttattttaaagataggagcactcatggtatcgtgaaggctgatgagactgatccagcagagaagggaaaattgaggatgtagaggagaaaggggtgaatcctttggagtgatgtccctgtgcctggagaactcctgagagccagtgctcaaggtgggtgagtggccttagacaggagcccgtactgctcatctgcagtgaggaagggaaggctgtcatacaagcacagagggacagccacgaattgacttacgtgacagcatttagaggtagggcatctgaagttaattaggtttagatggggtcatgagggtggtgccctcatgatggaatcagtgcccttataagaagagacatgagagaatttgctctccacctttctccatcatgtgaggagacagctagaaggcagctatctgcaagccaggaagagagatttcaccagaacccaatcatgctggcgccttgctcttggacttccaacctccagaactgtgaaaaataaatttctgttgtttaagccgcccagtctatgttattttgttatggcagcctgagtagagtaagacagagagtgaagggcgagaggtgattatgggaccctgtggaaatcgttatagttctaattttcataaaatctgcatggttcttttatacagattgagttacttagaggttgatcaatgacattagtgtcactagaattcatagttaaaatcaatctcctaggacaaaccatatgtaattctttaaggagcaaaggtttctattggaattgttctacaaaagttactttcctttaacacacattactagtcttaattttatagtctatagtccttgcaactattaaaaagagacttttcaatattacaagaagcttctttgtccttttagcaagtaaatttttagatagcaacacaactctatgatgtaacttaaatgttatggtaacagggatgtgaattttatattcattagcttctgtgtccattaacaagaagtaatggctaactcggggcttgtcttttcaaagcacctgagccaacagattgcctttatttcaagctccttcattaactgcttattaagactgatgatctctgaatttaggttctacttatctgccggggcagaatcacagaatatgggcttacacatttctgatatgattcagttgaactttcaacaattttcatattgaatgggtaaacagacacacaacttaatactcacaaattgtcttagcataataattggttgcatcatgtgttattttttgctccctttataattattccctccccagtgtacacatgctcacacccacacaatcattcaactgtttcaactgtattgcacattcctccaagacgaggggtcatgtcttttaccagtctcagcacctggcctgagtccccagcttgggaccaggctaattgagatcacagtcagggcagccctcccagaacatcacagtcaagggtaacttcgcaagtgacccaacatacattcttccctaactggcctccctgctttcagtcttacctccctccaaacatgtttccacagtgtattcaagagcacacgtggattcaagcactacctcacttaacactcccatcacccttaaatcaatcccaaacttcagagatttctatatatcctggatgtcaactagaactctgtgctccttggaatgtagaggattgactccaactcccgcacaccgtcctgtgaaaagtctcatgccctctcccaggtttctgcagggtgcagagttatctctcactcccatactctccctccactaaattactgtttactctagatattgattctaacaggaaactctgtcagtccgtctcttccctgacatcacaacagatgtggaacctgggctctttctttgattcccataaatacacccaaaatacaataaatccatatatgtcttttgtctctgtggtagaaaatactgaatgttttgggggagggggggttgataaaagggcatttcaacagagagaagcaaacatattaaaatccttgttcttataacttctttgtcctacctttatattttgtatttccactttttttccttcctcctccttctcctttttctcatgtcctcaaatcctaaaatcctgttcatttccaacacagatcatttcgctttctgtttttttttcttttcctacttcactacttgctcccagttttcgtcagagttttgcctcccaacccaaagtttggatatattcctaaacaaagcttgtttctttcctatcagggattctggggccaagtactaataaaataaagatattttgcacctcaccattctaaaaattctttcctcatcttactttatttcaacaatgttctttttcacaacttcgcatctttattcctgccaaactaaactgcttgggactcccagaatagcccagggacctctcatctccagcctttgaaagatgttgctgcttctccttggaaactcctttacttgtgacccttctctgttcatctagataattcctcctcatatttcaggtctcaacttagaattcatctcccagatttctcaagagtgggcaaaggctccagttatacagttctggagcatctgcttacagcacttccaaacatgtcattgcaattactccaatgaaattctctgatcacttttctcctcttgaagaagagaggtttcaatttctgatcctcacttcctaaggcaaactttgcacataagagtatttcaatgaagagtaaaatgcataaatgcatgaaggaagaaagaggctgaaattcagagttttgctaaattgtttagtctgaaaccataaaaccctttctaatttactgcctatgtctttgatcaaactagatctttctctttgtatcatcttcttagcgttttactgcatttagaatttaaagaacatttcaaatatagggaccgagacaattattattttagtttgcacacttacgtaattcctcttaagcaaagaattttggttcaagtaaagctactggaaagatatttctaggctgacaattcatcttttaatgcagtatactcaaagccaatttaatccacatctttttgactatagccatatttgacattttagaggcaggacaattttccattcagcaaactttgagtgttcatcaaaaaagatagatcattcatattgtgactcagagataaataaaataatttagcaaattgaattgtgctgtctttctcagtagggagaaattgtctattatttgctgtgatttgtcactttacttggcctttcttaatgttgtttacttcagtttcttttctttcttctggagtattgcattttgaatttggtccagttctcttttaggaacaacactttttgaattgaaaaaagaaaagccaatgaaaaatgcatcttgatgtcagaagtttaccgtttatatttaaaaatggtaaaattagtaaaataattagcatttggtgaaagtactatatgaagggatggtataagcatgccttgatattagataaactccaactaccatctttgaatgcataaaccttgtgcagatgggtgaaaagtgtgaccttaatttagtcatccaaatatgctttttgtagtgtcaatattccatattttcagattattaactccactattcaccttcctgtccaataccttagcaattgttgactcaagcagattcacttcttactctctgaaggttattcttgtgcagtcgactgttcttttctaataggaaatgtttaagagcacacggtttcttagcctaaaggcagacgatgcaatacaaataaaaacataatataatatgtttataatattataaatataatttgtttataatatagacaaataacattgtcatggatttaagctactgagcaaacagaattacatcaaaagttaagtcattagggggcacttttccaaatttcatacactgtagagattaactgagtagcatttattctataatttgaaagaaaaagttgctaataatttgtactggcataaaattacttaaaatgccagaattcataggaaacattacttgattttccctattatctttttttaatggtctaaccaataacatcaaaaaaaaaaaatcctgccataaatccatttttgaaacaaatgaagaataagcacatcttgtaaaaactttgataataaagtgagataaattctgtgttagaagctacgcaactttgaagacgttcatcagcagttggcttaccaggggtagtaatattcagtatatatcagtcaggagcaagttgggaagatatggaacacacacattgggtaattttagaagagtttaatgaaggaaatacttacaaaggatgtatggaaaccataaaaaatggtagcgtctctcgggctagtaacagcagggccaactgggcaatctcaagacctgaagaaatacaggaggagcagctgctggaagctggtgggtgttgggaggcgggaggatgtacagaaagccaagagatggaactatgacctttggtcaaggagtgcacgaaactgcagccagggctcagggaaggagccaaaacaccccatctgcctctcctcctcactatcaactcaggccagggcacccgatggactgaaccccaccagaagccagaacacatggaagcttttcgtccttctggtctacctccaaagacagaacagggtacatagaaggaagcagagagaggcaaacagagatgcaccacccagtaaccatgagaaacaatggaatgtgtgttgatagagcagatgaacaaaaaatgtttatttacaacaacttccactgcgcttaatattataccacttcctaacttgttttgaatataaattagtttttttttctgccgtttttaaaaattttatgtaagtttttggaaggaagaatattcttttcacagacaatattttctttttttttctttacttctgggagacttgccatgtgtaaacacgtacctcgataacaaatttgctgagggctatatccacgggtggttattcggggacataaagtgataggaagcacagaggactctaccctgcattccatctggggcgggcatatgtggtaggaatgtaagcatgatgcttgatgctggtaacaggccctctctggacaacagaatcttgatccttcagtgtctcactctgaaggaattttctctttcccagtttctgaaacaatccttttaatggatagattttagaaagccaatgtataactgagaatgacagagttcacactttaaaatgaattgcatatactgaattaaacagtgtaatttaaacataaagatataagcaataaattgcaaataatatgcatacatatttgcagtgtgtcctgatgcttatgcctaacctcttgtagctaagtgaaatctttagctgggcgtggctactagagacatttcttctctggccccgtctgacttctctaatacttgagactcattgtttatctcttctgagtactaggcctttgctgtgccgcgatgatcttgattgagctcattgctttacttgaatcaggttaacgtagtaacttcagagagagaaaagcagttgcttcaatttttcaaactttgatcagaaccctctccacttgcattttttacggcttttgctttccctactgtacagaccccagtgtctgggaaatgttggaggactcctttgccctttgagagattagtccttggagacatcggaccaggtcacttttcaggcagttgagctagagtggtagttttcaaattctcgatccacaggccagtggcatctatttcatgtacagaccctttttttttttttttttttttttgctgaggaagatttatttgtcctgagctaacatctgttgccagtcttcctctttttgtatgtgagccaccatgacagcatggccactgatagacaagtggtgtaggtctgtgcctgggaattgaactcaggccaccagagtagagtgcacctaaactaaccactagaccactgggctggtcccatatgcagagctttttaaaagcacagatgcacaggggctggcccggtggcgcagaggttaagtgtgcacgttccacttctcagtggcccagggttcgccagttcggatcccaggtgcgaacatggcaccacttggcacgccatgctatggtaggcgtcccacatgtaaagtggaggaaaatgggcatgggtgttagctcagggccaggcttcctcagcataaaaaagaggaggactggcagtagttagctcagggctaatcttcctcaaaaaaaaaaagaaagaacgaaaaagcacagatgcactgaagttttactcaggagtttgggctgcagttgaggaatttgagcatttaaaatctcctaggtttgtaacctccccctacctccatgaagctctgaataagtctctggacctcccagtgcataacttatttcctttactaagagtgaggaaagaacaaacagtggactctcaggaagcctaagttttagggcctgtcatttgcatggcccccgtgagtgtcagagttgcaggaagtttagagtggggaggggttgggttacagtcaggaataatttctttgtaaatatttctggtaaattgctgtaagaaatctcaaaacaaagagacatgaagcttaaagactctgttagttcgttgtgattttttttttctcattctgaagaaatacctaactttctatttataacatgttactattattttcctaaagatggttctccaaatagtagaggtgccagccactcaacatttgagtctggctctatttgggccactattagtgtgagaagaatgaggatgattggaagcagaaatagaaagaggagtggtagatgctgaattcacggtatttgataactaattggatatagggaaagagggaaatgaaaggacaaatggttttaaattgtgaagcttgagtgattaagaatttgttggcatcaagaatggactaaggaaatagggaggggtggtggattatggtgaaagaagatgatctccaatggacattggaaaattctaaggtagaatggagatagtggtaccctaaaagcccagtgtgttaaaatctcagctccaagattcaaaaattacgtactcttcaatcaattttgtgataatctgagttttagtttccctatattcagcagggactcctattaccaggcccagggcttcggtatgaggaatagatgagaatttaagtatagcatttagccctcttcttgacctaagttatgagatgaataaatatttgcccctgccctatatattttagaaatccctgaatggaaccctgttaaatgatacattttaaaagagggtaaaaacatgactcatacagatagaaaatgaacacatgtcaaatattttgtttaactataagttaataagggaaccagtaggatattaactggatcaaaagagaatttaaagtactacccatatataggcagacaaggaatgctgaaatgaacttacaaatagaagcatactggcttattccatggggtagagggagactatttctggtggataaattcatttgcatgtttatggataaaaatcattgggattactatcagttatctatgacttacagagctatacaatagtacagggaaaatggcagattctccatagaataaaaatcttcaagttagacattcagtatattagttttctattgctgtgtaacaaattaccaccaatttagttgcataaaacatgcccatttattggctcagttgtgttagatagaagtgtagcatggtttctctgcttagaatttcacaaggtcaaaatcaaggtatcgcctaggctaggttcttatctggaagatttaaggaagaatttccttccacgctcatttaggtccctggcagagttcagttacatgcagttgtagaactgaggtccttgtttctttgctggctattggccaagggtcactctctgctcctagatcctacccatatttcttctcatgtaatcgtctccatcttcaaagcaacaatggccccttgagcccttctccagctttgaatctttctgtctccttcttctgccaccaactggagaaactcctctgcttttaagggcttctctgattagattaagcccttgcggataatctctatattttaaggtcaatggatttagggctttacttaggatttaatttaatttaggatctgtaaaatctcttcatagcaattcctaaattagtgtttgattaaataaccaggaaaccagaatcttggggcaattatctttaggaatctgcccacaatctagaaatctttttgatccatttcaatgtctttcataattttttcttacaaacaagtataaagaaattgctctccattgtttaaattttaggttcctctcttgtatgttttaggtacatatgaattaagcatagtaagaacatacaaatgcttccttcttattaatagttttagtctatttctagcaccaattttccatacccaaacatttatatgtcattcataatattcatagcttaatcccttaatcctcaaattattacgcggcgttaggattattgttactttcttaaagggctgtgacacatttctcaagagtccacacatcccatgtgtgacagtagtggctcagaaaacatgacaaaggaaagaaatgctgtgagaaagcaaggctaggagctggacaagaagggagtctagctcctctgacctcagccctttactccctccctccgctaacacatccaggagccagcagggccctaggaacactggttggaaattacatttctgaggcaccaagtgggaggtgattagagataatcctccctattgaatctccaaaatggagttgctaaagccaaagaaccaccataaatcaggagtataaagacctagaatttctatgtaagtagccccttccatattgcaatgctcattactaattattcctaagatgagccagttaatcacccctcccttgactttcatatgatccaagcatctttgcatttaagaccaaactatacccggagcaaataatagagaagctcatttagtctctagcaggattttctcctatcaaagtacgttataatgtccccagcccttgacagccgtcattttttttttcctcttgtcctgaagcgctctacacagacctccataccaactgattttattccatttatatttttaacatcctaaaataagattttctttttaaatcaattccgattcatttgactcatttattttccattgagatacactcacagaataaagtgtgcattccaataaaagaaggggcatggttttcttaaattttcactacctgattcttctacagtaagtatatattcaaacacttagccaacatagtagacaacacaaatccttgcataaaaacagggagttcatatcctacagtgaagaggcaaaaattctctttcatattcttcttcaaatcatagctggtagtttctttcaactaaaaaaagcgacacaaaaatcattacataaatactaccatgtaatggaaatcaataactagttattgaatgtctatgagaagaataactactctactcctttctatggaaaaggaataaaaagcagaccccttatccctaagtcactcacagtctggtttacatatgagccacccttgaccaaaatgatcagtagcaatatgcaggtattaagagcaagaaacaaatgattgttccaaacaacgcatccaagtggaggcagagatggaggcaggctgcggagggcaggaaaggcttcattgagaaactgggactgtgagggtctgaaaagtgatgagtagagtgtggagagaaaccttagaaactaacttgagttaatgccttcttgcggaaaggaaggcaggccaaagaatgcgttcatttggctggcgtagtgaatattgttgggaaaaagtcagaaagaagactagaaaaatgggtgtcagtcagaccatatttctttcttagaacaattgtaacaaagtacagcaaactgggtggtttaaacaacagaaatttattgtctcactattcaggaagctacaagtccaagatcaaggcgatggcagggtggattccttctgagggctgtgagggagaatctgttccctgcctctctcctaggttcttgtggttttctggcaatctttgttgttccttagcttgtagacacatcatccggtaactctgccttcatgttcacatagcattctccctgtgtgtgcatgtctttatccaaatttcctctttttttaatgataccaatcatattggattaagggcccatcctactctggtataaccttatcttaactaattgtatctgcaatgaccctatttccaaaaaggtcacattgtaaagtcctgggggctagaacttcagtatatgaattttggaggacacaattcaacccgtaatagaaggcactggagagcagcctttaagtttggacttgatttgttagagaatgaaaggattttgaagatttatttactgttaagtttaaatcattgaattaaatttacttaatgttaaatacttattgttaaattggtttctagagcagtgaagtgtattgaggtagagaaaaatgcattatgaagttacaaattaaaataaaggcatagaggtggtgtgttacattgatattgtacaacatctccagatgtaataaattaatcaaatactctaagcacagaggaagaagaatgtatataagggatttaaatgaattttaatgaatgaatgaataaaatgaattttaaacacttattaaacatttaatttgtatcaagcattgctctaagaacttcacacgagctacataatttaaccccccttaatatcccaacagtatatgtattcttatgacttcatttttagatggagaggctatggtacaaaagggcaagcacttgcataaggccacacaaccagtaactgggaaaacctagattcaaacccaggcagtctgacaccagagcctatggtacagcagccaggtgtaagtaagagattgttttttgaaggatcatactgtaacttaaaaattcattgcattttgcactccactctgatatttttaacctaaaaatagtgttttaaatttctggtaattgagtaaaattgactctccaggagatatttattctctgactttgacttgacgatattccaaaagacacaaaacccagaatgaggagcatagggtaaaagttcatggattctggggacagacagatttctcaacaaattaaaattagttaacctttctacactgttttctgtgctctaaaattaatgtcataggttggcgccccggggaagtagctcctgagagatgttaagtgtgcagaatatttattatgggatgctcctgaagtcaacatctatggaaggaggggaagcgagtggaaggaggaaggtgttgagcagtgatgtaatctcactggaagcttcagccgatcccatggggaacactgaagctagaatgtccttcagagttgtcccaagttggggcaagatgcaaagtgaatatgtcattggatgtcattggatgtcattggacgtaggtcaccctgggaaaggcatgatcatgggcaaggtgcctatctgcagctgaggccatccctgaaggagctggcagctgagtgtgatgtgctgactgctctcccagcagctggaaaagaagtcctccatcgaagtacatctgtgtaccctaattcatagagtttttctaatgacagttttacccagtaggtgctcaaaaacttgttggttttcttctcattttacctaaagtacttctgactggtataataaaactgaatgtgttggttctttatctttttttacttttcttttgggttctttcttatgttcctttcttttcaatttcttcagagaataaagtgagcaattgagacaagtaatgagtttgttatgggctgaattgtgcccgccttaaaattcgctaacccccagtaactcagaatgtgactgtttttggagctaagatctttaaagagctgattaggttaaaaggaggctgttaggttaaaccctaatccagtttgacgggtgtccttatgagaagaggatatttagactcatagggagacaccagggatggtgtgcacaaagaccaaggagggcaccgtgagaaggcggccatctgcaagccaaggaggggcctcagaagaaatgaaacctgctgacaccttgatcttggacatccagcttgcagaactgtgataaaattaatttctgttgtttaagctacccagtctgtgatatttcattatggcagccctagcaaactagcacagagtatataccaactcatggtgcagttttcagtttcctagtttttgctccagagacaacctataaagaaatcaaaatcttgatgtgttgtacgatactttatttgaagtgaaatctaaaacaaatgcaaaatgcaaaccagagtcaaaaaatacctacttgacattaaagtggaaggattatattagtttcctatagctactatgacaaattaccacaaacatcatggcttaaaacaatatggatttattatcttgcagctctggaggtcagaagtccaaaatgagtttcactaggctaaaatcaaggtgttagcagaactgtatgcctttctggaagctctggaaaagaattcaccttttgctttttgcatcttcttgaagctgcccacattcctgactcatggtccccttccatcttcaaaatcagcgatggtaggtcaagtctttctcagggctgcacactcactctcctgcttctctctttcacttatgatcctcatgaattcagtgggcccacccagataatccaatataccctccctatgtgcaaagtcccttttaccatgtaaggtaacatattcacagttgctaaggattaggatttggaagtctatgactctgctcctaggggattaggattggagacctttaggaggccattattctgcctatgccagggatgtaaaacaattgtgggagaacaaaagagaagtgttttacctccgcccagaaggatattgggaaagcctcctgaatttgagattttaggatcagtgattcccagaggcagtaaaaaggaggatagactgtccagacaaaaagtccaccacactaaaaagcatatttgtgtttggagaaatacaggaatacaaaatgtgtcattcaaagcaagatataaatatgataaaaaataagaagggagagccagatggaaaacagggctttgaactgggttgcaaggaagtaataagatttcaatactttgaatgggatccataggaagaagtgagaggaaattggagataaaaagaattccaggtggcaggagcagcctcagcaaagttatagagatggaaatccctggacgtattcattttgactccatcctagggaatgctgtgaatatattgggaaatatggttatcaaaagtttctgttagacccaaagtcgatgctttaggatccaaaaaaagaagaaaaaaggaggtacagtagagggaaaatactaatttggggaaaataaattcttcattcagcattgtgtctaaacatgctcataccaatatccaaagttttccactacgatggaaagttgtcctataactaagttttcccctacttttgtcattgctgtgtcaataatctaaccatcgtttatcaagtttttatgtgccaacatagtagtaagggctgagttagaattgaagagatgaaaaacaaaggggtccaacaacttaaaacattactttaagtaacatggaggcagatctaagatatttctctaaaaacaactttctagtaagattctaagaagctggaatagtttgtcaatttgataaaaacgcagaatcaaaagaagcctcctttcttcccctaaagatagggtaccttcaaatttgtaaagtattacagaaaaaaaagaaatgaaagaagaaaaaacatggggaaagtgggagaaaaagaatcccttctggtcccctgatcagaaaagcttgaagaatcaactgtcgggagttgagagatgccacttgtaggtggttaagcgcttgggtcatgtatcatctctggaaatgccgctcactgctgctctcttaggctgaaagggttactttttctccatgaagacagtgatttgcactgtgacaggcaactcttctggtgtaccagtgagtagtcaggtaccagaattccaaagggactctgaagtctttctatactttgaaactaaccatgacagctgatcctttaccgtgatctaccctgatctttattgttggaatatttcaccaagccagcaggacagaaaaagcagacattaacccaatgtattgttagtttaggagggtaattaaagggaaggaaccagaggtcagttttgagaaggggctagaagttcacaggaggctgactaagaaaggcagacgagggaagagcacaggcatagctgaggttgtctagatgaacagtgtgaaggtaggagaggtcttgttgcaggaagaagggagtgcagatacattttgccaaattaatagtttgtcctgaactaattcttctccctgagtgatatcaggactcaggggtctgactgaaccctattttgttcccagagttcatcttgctggaaccctccagcaacagtactgaacttgatgagttggcttggattggaagatgactccctgaagtgtctcttagatgtaaaggttgctgactgcaccccaagagaattttaatcaacttgggcttcaaagatgttctttaagggagaaatgggaggagaggggaggaaccatctggaatattctggttagaacctatctttagcagttggacagttttctcaagatttggcacactgtaacttctagctcataaatctagtgacaacctaacccctatttactgaactaataaacacagaatggtcaaatcacatttcagtgtggtaatgcttgaaaagaagaatgcattgtttggtctgtgtacttggttgcttccattattccttctaaaaagtatcctttgctaattctcccaaaagattactagctttctccagtgattatttgttcttcaggcgagtcattaggtgggaaacagaaggtcagaaaacaaaacactttgtaccataggccattaaacagttgtaaataaaattaaaacacagagatatgttggaaccttggggcaaggcaagcatccagaaacattttcgaggcttagaaaatttaagacattactttaaattacacagttagtgtcagagctaaggctgtgctctaaaaccagctttctctacgtatctacagagtgtattttaaacttatggtaaaatacctttgttttggaaaatataataaattctgctacttaggctggattatagtattaatggtaatagttaagatttgctgatcatttacattgtgccaaggactgttaagcccttaatatgggatatttcgattaatatttgtaataacaatgaggcagatattattatttcctccatttgacaaaagagaaaagtggcgctcaatgatattcagtaattaacccaaggtaatgtggctaataaatggcagagccctgggtaaaacctgttgtatttggtttctgagtccaagtttgtccccaccgtgcaatgtttgcagtactcttagtatgaaaatattctgaataatcaaaagcaactattgatagacttttaaaagtaagttttcaattaaaaaattgtacaattacatgtaattaaatttaaccttcttttaggattcagaagacgttttaggattttgcactgtatcaaggtaataatcctcaataggacttgtcaattttcctgcaaaagatgcaaatatgatggctaatagaaagcttagcactaaaaaatgatgactaatttaacgcctgctgatatatgatatatgatacagtccatatgctttattaattaaaggtctacaaaaatggggattaattaatgaaattagccactcgcaggagaacaaatactgcataattccacttatatgaggtatctaagatagccaaactcatggaaacagagtagaatggtggctgccaggggctgggggaagggaggattggagagtcgctcttcagcgggtacacagtttcagttacggaagatgaataagttctagagatctactgtatggtattgtgcctatagttaacaatactgtattatgcactgaaaattttgtcaggaaggtaaatctcatattaagtgttcttaccacaataaaaaatctggtgattaattgcacatctttgctttagtgctccaatagatcctcattcaaattagtttttctgcctaagaatatgtatggtagattatgaagtcattttaacaagtgcagttatctagcaccagttcacatctgacccattctgcttctctgctaatcttaattaaagagaataatgcttttgaccagcagagagcagcaatgatatactttaaaggagcaagtctgatgaacctgaccatcttttctagcatgtccactttgtgagatcatcacagcctctgtcttgagtaatctcagtctttgagtggtttattgttaaaagatcctggacattccctgaactcagtacatgaggttcttgctgcctccctgagtctccatctcacatgatagtccttctggcgcaatgggtagtgttggcccttgcttgtagctttgctgccaggaggacccagatatctgggtcaagatgtgccactccatcatggtggtttctgccctcattgcccagctgcattcaaggccggaagttgtgatgctttatggagcttgtatggtgttccgtgttgacccatagtgcagccttcttgtgtacaaggctgttaaggatctctgaggatagtggaaaggatcacattgatagaggagtggacagagcacataacctggggggatgtatattttcagaaaacaggagtagagcagacagaacaggaacctggaaaaatggcagagaaggaaaaatctgtcagtagaagccaagagaagagataatttcaagaataggatgtccaatttttaaacccccttggtgatggtgaaactgaacttagaaaagttattgactttggaaatagatgatgtgggggacctcagaaccactttagtctcattttgagggctcaagctaggttacagggggttggagggaagtagttaagaaagaattgtacaaaagaaagttggtaggggctggccccgtggccgagtggttaagtttgcgcgctccgctgcaggcggcccagggtttcgttggttcgaatcctgggcgcggacatggcactgctcatcaaaccacactgaggcagcatcccacatgccacaactagaaggacccacaaagaagaatatacaactatgtaccagggggctttggggagaaaaaggaaaaaataaaatctttaaaaaaaaaaaagaaagttggtatcaaagcaacctgagaaaaatgaaagacccttttgcctccaatgcaggagggaagtggaaaagtatgaataatgatacagagaaactaaaaggtagaaaggacattaatggcgtcaatctgctcaataaaacaaaaggccttggctttctggtatatgtgtgcttgtttctttgagagttggtgccttgagagtggaaaatagaaaataaaatacaataaaaagaattccgaaaagtcccatgaatttagccgaggtcatataacatgagattatggtagaatcagaagagaaattctaatattatctcaattacctgagactgccagtattcagaagttaatgggtgataaaaatttactgagtagcattgattaggatagtgggagaggaagggcattgatgaagccagagagggtggttgaattgcctaaccttggggtctaggcaaatggaagacaagaaaaggtggacatgacaatggactggggaatgggagttcgagaaaatgaaagtcctataggagtccataggaacgtgggatgcagaaggactaaagatatcagcctcattctccaatcacctcactaatctaccttgatcctttttagttcttggagcatagaagataatcaatacatatttgctaaataaattaataattattgttaaacctaggccatttaaaaaataagcattaaagttgtatatgtcacaaaataagcagctttttccgtaaaaaggaaaagcctagagagatttaaaatagaaatatctaaactacatgttccttctgccccactcccggccgcctcccaaagagagaagtctcagcattctgtaataattaccagtgaggcaattaatgaattccctgacctaaaaaaggattatttttgacattttcaaaaatgtgttattctaacatcctatcaatggcatctgctgcacagctgcaaacccataaagagggttttgcctttcactgtcactggcctgtggcattcaggctcacatcttcaaagctgcacatgtctagaaacctgaagctggaagtttccttgggagcagcaaaaccataaaatttaccttccaaatcaagacaactcaagagaggaagaggacactttcactaattaaccagatcaaagttaaaaagtgagaatgtcttttaatgcccctgattctacagatgaacaatgaaggttctaagagggtaagtggcttcccctaacccggtgtctccattcaacaaggatgaggatttgggtaaacgttggaagcctctgaagatttgtcagatgccgtgttaaaacagcaagtggcaaatccaattctgccaaatgtacaaagatctaataagaagtggcccaagaacaaggtccatggatacaggctgttcttgtacgcttggtgacgttcctgctcttggtctgtttacgcaccttgataaacattttgcgtgaaaggttctaaagcatttgcaacaaaattctcttttttacattttaaataatttattttgaaaaatattttctaattcatagaaaagctaccagagcagcacaaagaactcctgtccttcactccacccatatttcccatcacctctctctcaaccacttcctgaatcagaaaatcaacactgatcaataataccaaatagtccagtgaccccatccaaggggccatatctggaaagtagatctttcaaatgttaactaagtcttcctgaggtttagattgaaattacattatatacaaatatatattatattgtttataccaaagtactttttaacttttttattgaaatacaatgtatacacaggaaagtacacatatcctaagttttcatcttaatggagttttacaaactagacacacttgtgtaaccattgaccagataaaaagcataacgagcatcccaggagccaccctcatgctccctaccagtcactactccctccctctgtggtagaaactatcctggtttctaacagcagagatgacttcttggctttaattctctacataaagataaaacatacagtatgtgctattttgttgttggctacatctgctcaaaattgtctttaccgcatcacccacattgttgcatacatttacaggattcttattgctgcatggtattctatctgtgactaggccataattattttattcattctactattgatgggcattttcttttcttctgatttgtggctattaaaaaatatgctgctgtgaacaatctactacgtaccagtcaacataacataagagctctagtgcaaagatgtaaatagcagaaccaggacaagtacccagagctattaaccccactctaataatccttttgtcattcacttatttcccctgcaacaaatttttatatagcacctacatggaaaatcctaggcatgatggatacaaataacaacttccacctcatctccactttcaaggaattacagtagggtggaatctacttaggattaggatggaccatagagtagtttttaatacaaaggaggatcaacattaccctatggagaatcttcttggagccggtgcttctgaattgcattttgaagaatgactaggacttagatgacaaaggaaaagaaaggaattttagcttgtgcaatggttcagaggcagaaaaacttacggcagcgattctgaaacccagctacacattagaatcttctagaaaatttttagaaatatgatgcccggtgtctacctcaaaccaattaattaagaatttctgcaggtagggcttggatatctgtaagttttacaatccttccaggtgcttctaatgtacgtcaagattgagaaccactggtttagtggatttacaaatcactcagtgtggtttatgcataggataggagggaaggaatagcaataaatcctaaaactgaaggtcaatgagcaggccagccaaggcttcgtccttgctcaaaagtgtcaccaggaaaaacaaaaagcacgttggcactttatataattcagctaatacagtgtgaagactaggcaggagagtggtgtttaagtctctagttagtgatgtataaaacatcatttacattcacactggtttaattagcatttctgcttcaacactggttgcattatctcacacttttcaacacatttgtcccaagaacatcaactgacaccaaacaaacgttttaaatagcaaacttagagaatctgcccccaaatattttacatttataatgaccccaggtctgtgtctatctatattgtgaagtggaaaaattccccaaagttgagaacttctgtaaattcactgctatttccaaagtcaacaacagccagtttgccactttctaagtggggactttggctgccagcagctgctgtgtgtgagcagggaagccagagggaaaaatatataaagtttatacctgaattttacccctactcaagaagcagtgggatgtggagaaagactgtggtttctgtggtgagagagacctgaattcctatatcctgaattcctgaaatcccagtgtcaccagttcccagaggggttatcctggagacagttagttaatccttctgaaccaaagtttcctcatctgtaaaatggaagggggacaaatattttgagtgtaaactttctcccaagcattgcatgtgtacttttaacaagtatgatcttatttgatcccccagtaaatgaattactatgaggtaattagcatcaatagccccattttttgtatgaggaaaacgaggctcaaaactaagagacctactccaaaccctgatcttttacttaccacacagcctaagtaaagtttttaacagaaatcacatcaagaaatagcacattctctgtttctgggaagcaataagatatgtttaaaacaacatgaagtcataatgccccttacttatcataatgtatataaaagatgggctacacttgttcaagcatgttgcaagtgaaaatcttttctctcagaaaaattcaagtaattatgcctcctgtctttaaagaagtatttattgagcatctactatatggcaggtcctcttctgggtacttgtatgagaagaggttggtaaatgaaattggcaattctccacatttagtaccttttagtctcttatggagaaaaagatctcaaggaatagcatcctcctcattctgtatagcctcctatctggcttgatagaggggaaaaactgctacaaatgctcttttgtttgttgagtggcatttattcatttaaacaaactgttaggacaaatataattgttatgccatgttttgaaatgtcacctctttcaggagcacatactcatttgatttttgctttgacaaaactttttaatcagggaggaaaagaaagtcttgggtttttgttctcttcaatccatgtgagcatctctaagcacaggctcttctttctcaactttccctcttcatctctatgaaaaatgtttgtactttacctaatttttatgttgttctagcttctccttgcagctctttgtaatatagatgattgaacaagccaacatgatttattctaattccccagcttattaaatcaagcacttgaaggtcagtgttaaacaggaacaggccagaagatcttttaataaatgtcgatggttatggaaggcaaatgtgatgggagccaaaggaacagagacttctgttttgggatgtcttcaatatattctgacatagatcgaggaggacaatgaatttcttggccccaaagcctgaagtgatttttatatacctttgtaaactttagattatgcaggactgcatgtttaacagaaagtgattgatcaaagagaagctacaaaactgggaagaggagctatggcatctcaacgggaataaagcaaaaggacaatgccactgctttaataattgaagtgtgatttctacccaagattcctctatactgacacattggagaattttctgatattcagcatcttcatttgttcatttcatttattgaacaagcatattttgagcacctactatgtgctgagtgatattctgagttctagggatagcgcagtgaacatacaggcaaagtcatgccaccatggtgtttatattccattgggaatttgttgagttggagaagatggagggggggtcattgcaggtcacataggatggcagtgcagatgataaacaagtaaacaaattaatgacaagatcatttcagacaggaaaaagcactacaaaaaaaaaaaaacagtcatgagggatagggtcgaatatgactttgtctggctgtttgggttgtcacaaaagcagaccctgagataaggaattggaggcaagtgatttacttgagagttaatcccaataaatatggtgaaagagtagggaagtgagatggcaaaatgaggaaagccagttgagaccagagaacacctccacctggcagtgggatgcagagaaccattgctctgtacagggactgtcagcccacgtactcaggacaggctggggatgtggccagtgtttgcagatgtaagagggagggaagacctttttgaagggatcctcttgagtcgagacctgaatgctgaggaagacttgggcttgtgaagatcgaaatgcagaatattccagtgagaggaaatagcagatgcaaaggccaagaggtgaagacactcttggcctattctgagaataggaagactgattctgggcctgaccatggagtgcctttgaggtcagggtgaagatttagaatttgatattcatgcctgaccccggcagagagcccacgtgaaagatatcagttttctttccaccttgatggttggccttggcaagaaataaatttacttcttaaaattcctgttttgatttagaggtgtcaggacaccattactcgttgctttgtgtctataaagaaaccattcagcttctctggaccttggttccccatgtgtaaaatgggaaggtgaactcaattcctttcagaaacattcttatttcttttcactcaattggacgcaccatgaagacaggaactttttttgctagcttcccttcttcttgcacaaagttggtgctcaataaatattcattaaccacatgttgaattttatgcttctcaagagctgtgggctttggagtcagatatacaatggctcaaatctcattctgcctgtttgagctgggctccctgggacaaatgatttcatttctcagaacctcagtttccccacatgttcagtaggggttttctttgtagtgattctctctacaaagaatcaccaggattacacaagatactgtaagtgaaactgcctagtacaaaccaagtgcttacctgatttagtttcgtcccatcttttggccctataaggccagtaagagtttaccctatggctgtaatggtctccaggaaatgctctgattgcagtcctgggcttccaaagactgatcttcatttgtacaatataatagatcacatttatgttaaccattagagtctttgatgttgtgtttacacctggtaaaaggtcatggaaaactaaagctaaacctagattggaaaggttacaggcttggtctgctcaagacaatcgcagggtatttataaactcaggagtctgcatactttacatctgaaccctaatgactgaaaaagagttgttcaaattgaggcttcagccgtatattaacccctgccatcattctcggaagtcccccttcccccacgcaagagaaagtaaaataatgaataagcttttaaaaaaatgttttattaatgtgctccttatggaatctccctcagaatagctatgctaaaatatataagggctgatgtggccctcttacttcacccttaataataagaggttagagtggaacagaccattatgttggggggtgggaaataaagttgttttatatcctgattgcagagacattcagagtccgaaaccttggtttttttttcctttagttcaaatcaccttctgtaagtgatggtattctggtggttttcaaagtatagtctgaggtccagcaacctgggtgacaggatcacctgggaacttgttgaaatgcaaattcttgggcccaccccaggctgactgaattagaaatctgttttaacaaggcctcctggagtttctgatgcacgtttaggtttgagagccacagctttattcatctagcagagagtcggggaggggggcttctgtggagcaaagggcgggggcaggggaatcattgggacttccaagcccactagccccaggtggggcagacttccctggggactcctgtttgcctccctgcttgaggcgctttggacagctctagacgactccactttttacttcactatcccaaaacctcaccacttcctttaagccttgggcttgaaggactgatgtcagtcatcagggttttccagaatgtagctgaaggggattgagatcacgtggataagatcaagctgaggagagaaaggacaaataagtaaataaaagctgcccttacctgtcagttctggggccaagcatctgttgtcaatactagtcagcctcaatatccaggtgacatgtttgtagaatagccctgggctttatttttctaagaatctgtagctttttcatctttaaacatcacaaagactcccttcctttatcctagctcagttagtgccaggcccagacagatgggaatgagaggaaagcaaaaggagaagaaaaagtcccttccattaaaatattaaataaccaattcagagaggcagacagcaaggaatgttagagccagaaaatattctggccacaatttaacccaaatcactcgtttttcagatgcaggaagcagaggttgagaaaggtgaaataacttctcaagatcacagattagaactcaggtctttcaaatgtgtgattttccaagtggttttcaaactgaagtccctgaactccactccatgggtccctgagattctctgtcagaggtccataaagtaaaaattattttcataacaatactaagaatttatttgcctttttctctcattctcgcacatacaccagagttttccaggcactgcatgatattaataccacaaattgaataaagaagtagacacaaaaatccagctagtctatcaaactggacagaaaagagacttgcaaaatgtaaaccaatgtcactcttctcactatttctttgttttagaaatataacaattattattattttgctgaggaagtcttcctcttttttgtacgtggcttgtcaccacagtatgactgccaacaagtggtgtaagtccatgcctgggaaccaaacctgggccaccgaagtggcatgtgccaaacttaacaattagatcacagagctggccccaaaatatagttattttgagccaatcctgatggccaattggttaaagttcagcatgctccagtttggtggcctaggctcagttcccagtcaaccataccacttgtctgtcagtacccatgctgtggcagtggctcacatagaagaactagaaggatttacaactagaaggtacaactaagtactggggctttggggaggaaaaaaaaaagaggaagatcagcaacagatgttagttcagggcaaatctttcccagcaaaaaaaaaaaagttatttttcataaaatttgttatttttggcatttaatgggtttattattcttttgataaattagttaataatatttttaaaaaattttagctgtaatttttaatatagtgaatactgatagataaaacctacataaacgtatgttctttgtggccctgaacagtttttaagagtgtaaaaaggtcctgaggtcgaaaagtttgagaactgatacactctaccatgactttaaaaacaaatagttgaatcttagctcataaaaagacaattttgacattgtaagccctgtgagggcagggatatttgtcttttttgcttagagttgtttcccaagttcctacatcagtgcctgatatatagtaggcattcaataaacatgaattgaatgaataaaagaatatatatcttataaaaagtcaacagttattattcaaccaatagttaaaaaataaatccagagaggaaactcccttttgcagaaactgccccatctcgggagtcctggaggtagaaactgggatcagtggcaggtagcccaacctcagttatcatcctgacgtcccagaatcaacataaaataggaaatacccagatgtgtgctatggcctctcttcactcatgtgagcccttccacctccccatcctccacatatttcttctctgaggactaaatttatcttaagatacagacatgtgacctggaaaattataatttaggaaattcagagttctggctcatttccattttcactgtgctcagaattatcagatgaccctgaataagggagaaaaaatcttgacttacaaaacttatatactgccccactttccttaggctactgtttttgtgttgtttttctgagaaataatctccacaagagaattatttggtaaattttccctaaatgttcccgtctccttgtgacatgtaacgattaatggagctcttcctcacagaggaggtgttcctctcgcatcatcagtgcctgctgggtgcaaggaagtaggactcttttagttttcgtcttttgcatacgtcgtcctcttgatcaattgtgtcgagcccaaaagttggccattatcttagtccatttgggcttctataataaaatatcacagattgggtggcttataaagaaaagaaattcctcacagttctggaggctgggagttcgagatcatggtgccagcagattcagtgtctggagaatgggggatatgaaagcttttgtgccattccaaaataagatggcatgtgtattcatgagaagctagtttgctattttaaaatgaactgtttccttatctacaaaattctgcagcaggctgtatgcttttaatcgttgcccccaaaattcatatgtcgaagtcctaactcccagtgtctcagaatgtgactgtatttggagacagagtcttcaaagaggtaactgaagttaaatgaagtccttggggtgtgccctaatccaatatgactggtgtccttataaaatgaggagattaggacacagataccaccgaggggagaccatgcaaggacactgggagaagagggccacgtacaagcagggagtgaggcctcagaggaaacaatcctgccaacaccttgatctcagatttctagcctctagaactgtgagaaataaattactgttgtgtaagccactcagtgtgtggtgcttgctatggcagccccagcacactaataaataggcccagctattttcgtgagcactttgtcctctactatggtctgaatgtgtacccacaatgaaaacctaacccccaaggtggtggtattaggagctgtcgtctttgggaggtgattaggtgctgagggctgagcctccatgaatgggattagtgtctttataaaagagaccccagagagctggctctcccttctaccaagtgagtagttcatggactgcagtctagaagagagccctcactagataggctggcaccctgatctcagaccaccagcctccagaactgtgagaaatgcatttctgttgtttataagccacccagactgtggtattttgttctaacagactgaacagactaagacagcctttatgactggatattggcatccaagactctgaagcacaaatctgccaaagtctagaacatccatccctatggccaccttggtgatctcactcagaggaaagggatcaagaaagctggagcgatcccagagatggttgcttcttcatcctctcccaggaagttcacaccccactcgacaccatctccttttcctcccttggttgtcagtctttcctcctctgtatttccaaaccacacaaaatggtgggttgtcagtgctgacacactgaatagcaacacttaattaacaaacacacactactctagcaccttttactaattaatttacctcaactttaatttcgtttgcttctcaatttctaaattctaactaaacctgctaattactttgtgctaattttgtggcatttttctagaaaagagaaaaaaaatcttacaaatagcagttttggagataaaggtggatagtgaattcagtgaaggacccaacttctgtttaagaaatatggttaggtaatagagaaatacattggttttgtgttttttaattaaatattctgccttaataagaaatagttgctgtcagtgtttggctatgccttttttttgaccactcaaacacgtgtttaataattgtagaaatcctaaagaacctcagcctgccgtctaggaagttgtgagtgaactgttgtctgtgggttggtatgacatgactggggggtgtactgcagcatcttcccaccctctgagctggttcaaccagcaaaggaatgggggtatgtgctgacttctgtattatcttaatcttatgtatttaatgtcaataaggcatttgtgccaatggctgtgaaacttaaaggaagactaaaggtccatgtatcaaaatccttctcctctttcttgactcactcaaaattctacctcctccatgaatggggctctgaggtcctcctttctatcagagggtggcgttctctaaacttttgagcagccaactcaagttaccaccacttatgtatttaaccgggccaaaatataactttttcccctaactgaacttgatttctatcttgaaaccttgttctgtctcatgtgaaaacaaaaacctcttcatttccaggtaaattcaatccatggtgtgattcttcttatttcaaatataaagatgattaaattcatccctcttttgagattgatgctaagatctgaggttcttactcaagcatctctgtgacattggcaagaggtcagtctctgcttcctcgggttgatctgtctggattccatgcaggttccagtcatcccttttgtctttgcgcctgccacctccctggaggcagcttaaggaggaggcaaggggatttcagggaaacactcatgtgaaggctcatgtgcctggagagggtgggctcaaaattccaacacagtctcccctgccttgctctgtggaaataaacgaagactgttcagtgagaaaaattgaggttgtttattcagagcttctgtatcaaaggagtcaaccttgtgtttggcatagactcaaaggcaggcagaggagtgggaaagctttataaaaaaagaggaagatttcaggtatgctctagttggaggctgtcggccttcgaaagatggaggtaggctaactaggagcaggctatcttctgtgcttggttcgagaagcatagtttctctggatgcttctgagtaggaagcagggacaaaagttagggaagctggcagtctttgagtcctgcctgttctgggttgactgctgcagtggttggggtttggctgatgcattggttactgcagtgtttacgggtcaggttttattgtcgaatatgatctggccattgtctgtttacagagtcagtctctcagctccctgaggaacaggtgggatgagttgataaggcagtggttctcgaactttagcatgatcagattgaatcacacaagttgagagacagacacacacatacacatattaacaaacaaattacaattcacaattcatcttgccctatttgtctacatgcccccctccaaggtcattagctctttgggaatttctcttattcattttatactgtcagtttagtaactaacacatagctaattggtgcttgatatgtatttatagttttgtctagattcttctatctgtatcttgggttgactgtgcctaagagaaaagatttggccccaaggtagaaaataaagctcccattacctactctgagtgctaattgcctgaagctctgtggctgcctgctcagcggcagagatgaggagaggaagcaagcagggacgacgcattaaggataattgagtgagggaattggagatcatgaaacaaagaaatggaccaaggagcccttttgaacagcttaagtcagtttgatgcgctgcatggcttccccagcacggtggctgtccacatgaaaaagtgagttagtttgagctggtcatttacggaatccgttcactgcctctctctgggaaatagcgttaactctttggcaagtggtctggtcagggtaaatcaattttgacaaaattggtctcattattttctctaagtagccaattaaagattactgttatctttatttaaacagaattgtcagtgtatatttatttacaaaaatagaaaatgaggaggtaatgcattaatacattaaattgtccattaactcatttattacctaattgttaataacttagcctgtagagcagtggtgatcaagctggggtgcatattggaatcagctggggaggtgaaaaaactctgcatacccaggctgtgcctcagatccgtgagtcacaaactctgggggtgggacccaggatatttaaaactcctcaggagagtccaacgtccggccaaagttgagagttggtgatctagaagtagacgtcgtggtttaaaccccagcaacccagcttaccaactgagaaagtggcttaacctcgctcagcctcagtttcctcatttgtaaaatggtgaagggactagcatctccctcaaagggttataggaaggattaagggagataatacatgggaattacagtgtagtgcctggcacacagtgttatatattagttttattattttagtcaattgtaatgacatttttatttctattatcattaagccctatagaaataccgaaataataaaatataaggaaatatttaattataatactagggagaattatattttatgaagataaaatgtgttataaggaaaaagaaaagtcaatttatagaaggtatcattgaagtaggaacagttggctctcaagtcttttcttctaataaactgatctaagaataagaaaaatttatccattaataactaagttggaaacctattttaaacaaaccaaaaagaactgctcagttctgtcttgttttggttgttatttcatttttgttcttggtggggtgggcatgaatggggtaggtgaggagggtagatttaaatattgggttatgttatacttttggaaaatcccagaggagaaaagcaaaattggttcatgatatgcctagtttcctgggtaaatagagatgaaagaccatataggaaagtccaaagattgccatgtctagttcttttcttagaaacccctctgtccatagtccctgctgagggagttgtaattgtcaacagcattttaagcacaggtagtttggttttctccatatgtcttcatgtccaacaatctgtttgtccagggcagggcatgttatctgtgggcagccaatctatggccagaaaatggtctcccaggtggtctacatggaaagctttgagccaccagaaatagcttcagttgtaatagaaccagccacatgcctgtcttgggaatggtaaaccagagataggaggaagtcagtacttgtagcaaaaattgaaagatgaatagagggaagcatgaagttgcagaagatgggtaaaagcagaagccataaaggagagaaaagctatccgaaggaaagtgtgatgtcattagttattaatggcgggagtcatagaacaagaaacaggaagttacagtcgttataaaggtgtaagatcaatgatttttacctgcaagaaagagattaaatatcctgatgcctaaagctccctttcggtctatctagttccagaactaggttcccagctctgcaaatcttagagctgttccagcgcaacctgaagtttggctgcctgagactgcctcacttagttccatgttgcctcaaatgccattcttcctccccgcatgaagggagacaacaggaatgtgtttctgttccttggacaatgaataagtcaatgagtgaatgcacctaagaaaactagaacaaagaaaatctttgccaaatggaatcaaacgtttcttggattccaaggaatgcatgcttgtggtcaagggagtaaccaaggtttgtgggacctgaagcttaaacagtttgtaggaccatctttaagaaaaggaatttaagtaatcttacttgatccgtataaatacataggcttcattggggcctgagtaaacagggagccctaaggcttcagcttggtgagcttcataatgaatctggtataaagtgagggaaaaagaaatgaaaaggagaatgaagtgttccaaacatcatctctttcactgtttgcctaggccagaccctggcagaaactttggaaattcttattatttattgtcaattgttctaaatgactgtacatttttagcaatttgattggtcctccttcaaagacttttggtcacatgtgtgtcctcaaaaagcttgcatctgttagagttattattggacatcaagcatttgtttatcttgttgaggttctaatacattttatttcattccaatgaaatataatattgattgtaaaacaattttgtccactcaccagtggtagctcagaatatctttactaagatttgcttttctttttggtacccatttattcccaaaggctaaaaatccaatttattgttattgatctgtctttcagcatagtgcaggaatcttgtggattagtttttttttaatctttccttagtttagttttataattaaactcctactgaagctgaattgtcaaaattttaataagtattggaaagatgtttccttaatctcttttctattgttttgaagtgaattaaaccaatatgaaatttctagaaaattcatgtggtaatattttatcttgtttaaaattagttttcattcattcacttaagaccttattcagttttctgtgagtttgatattctgttttgggataaaaaaggcaaattgtaaatccacagaccctgatttcagcggataagggtttattttaggtgaaatacaaatgcaagctacatgaaaccgactattacctatagtagctaaagtagggatgctaactctgattgcaactatattaagtaatgtatagttagagatatgacctggaaggtaatatgcagatggagtaacagtgggattatgggaaagagagacaggaaatgcatttcaaaagagcattgtaaggaaaacaatgtggaggaaggtgacaaaagcacgctgagtcatgacaggaactttaaggaagatggcctggtagtgtgggggaccactgtggacaactggtgaaaataaagattaaattaagaaaaagcagccagactgtaaatcttaagatttttcttttaccatggtgtaagacatgaagtcattaatgattcttgggtagaggaatgaccttattatgctgccaaaggtttattagctctgaatttagactcaaagagatttgtgttcaatttgtgtctctgcaacttattagctgtgtaactttgggcaggatccttacccttcctaaatctgagtttcttcatctgtcaatggtggtactgatgagtctatgtttcatagtattgttatgagtttttaatgaagtaatgaatagtaaatatttattggcctttgaggatagagtaaacactcagtgtatgacaacttttgtcatgatttcaaagttagaatctggtgtgtttagtatttcagtgctggtcattatcaaaatgggaaaacagtgacttttttatttttatattttgagtttaagacaaaaatgaagcttgtgatttgatattatcagtaaaagcaatatacacatttttaggtcaccttattttatttaggtgcctggataatccagaatagtcagtgatactatagatttgcatgcacttctatatacacatgcagcagaaatgcagaatttaaacaattatcagattaatcttggtcccgatttatgcttctgctttcaacctagaaaacactgatgagttgtgtttgtttaaaatgagtcatgtagataattgcatttgctcggagattagtagaatccatgctgggagaggcaaaggaggaggctccctgttggacatgagcacttctgtccagttactttctcatattctgaagccttgagtgtagttttacagattatggaagggctctgataagattgaatcaaggataggaaacaagctacagatgggtctggactgtatcaagctctctggctttctcattttcagcctgatcaatgtgcctagccaaaagagagtggaaaaaaaatcccagttctagacttagatcaaaatggactaactttgactctttgatggagaaggaaactaatgatgacatattaaagttgtcaaatgtctcctatttcttggtatggtttagacactgaatatttgccttgtgcatttgttttttgttcgttcctgagttaaaaagaatcaactactaattctgttgttccctgttcaaatattgagcattagtgaaaattctcctgtctcacacatccttggattcagttccctatgtctacacgtgggctggagctgtgtgtttccagtgcttaaagaaaacatggggaacaatctgtcccccaatagtagagcaaattgtgattttagaatctcttagcttagattaggtcccagagaggctaactgaagcctcctccccatctctcccaccaggtacatctttcccttccctctcaaatagatacaatctctcctttatatttcattcagccttcaaaagcaaaagagaagtcaaaccataaacgagaggaggggaatcattttgtcagctgaagtagataaggaaacgagttccctggctgtttgccccagctaaattacagcaccacgtctgtgggaaatccaactcgatgagattttctttgctactgttgctgaaagaacgcttttctttgggactcccatctggaatggattgtgctgtcaccacctgcaaagcttctcatccccttgtgtggacagcaaaccccattttcccccctccatttgcagcttctctgtacattctcagatatttccctaggatttggacacagtgcaatagatatttccaaacatgtcaaaaatcttatttttatgttttaagacttgatagcatttacaaaatagcataaagtatagaaaacattttccctcagggtttacaatctgggaaaagttagaaaacaaacacaatcagatctcaaaaatgatagcaaattggctattttaataacagtgggatgacactatttttcttctgtgcctgttagagaaaaaggaaagaagaggaaaaacatttatactaatccctaatattaataggaggccagatgagcatggaaataagcttcctttttctgtttttttaatcaatttgaggcaaacaggctacagattgcagttagggtcaggcagactgcctcagtttctctagatgactgagaagtagatagccctgatgaagtttaatgctgcaactcatctgccccagggccagattgacctggttcctgacccaggaaccattcaccagctgatagtcggcatcaagaatagcaacattgacacattacttggagatctcttgattaggcacaaaccttctctctccaccctttctttttcttgtggcaggcagtccatcttcctatattactatctttaaagtggcacaaatgcttatccttacttggtggatgtggcaagtctccacctccccttcctggcgcgctgtttatcccctcaaagtccatacagatgcaaagtggggagaagtggaccagggtacccagccttgcttctgcattagaactctaacatgatgactattcaatattatcaggattaatatcccaaagtccaaaactgtggaagtttcagggacagttggggcaagataggtcctaaaggatgatgatcattggatccttctaatagctacttttctcctacttcattttaccctttccactagcatcctccaagatacctagtatcttaaactctactacagtcttaatttcctcatgattctaagtctaccataacttcagatagacggatggatggatgaatgggtagatagatagatagatagatgatagatttcttgttgtttgtttttacttgattttgcataagaaacttcacttctattttgatcctcattccattaagtatcagaaatgtgattccattgaattagcatgctccccaccccttttccttttacatggagcttatgtagtatgaggacctggtgggtgtgtgtgggtgtgggatgagaatgtggatcatgcctgggtcttcattacctgtatgcactatccccactgtgtcctgcctcattcctgcccataagaccccttcaggtctgtggttctctgagccacaccacccccaccccacctctgcaaggtacacaggaaccattctactgtccctgaacccttggtgggttataataaacctgctctcagcaccccttttgggcatcatctaatctggtgtcacagaatctgagaagctgagagaatgattcaagccagtccacatgcagcctcaggcaggagcctttttctggtcccacctgtgctagatgaggagaaccctagtggattgcggaattccctgagttttacttggagacggcagcctcatccctcctatacctcattccccaaacccatctgggatttatattgtctccctcacttccccacctttgaattcagtcccgtggaatctcgaccttatctgagaacggaagtgcaggtaaacatttctataatcatatgttctgctaaatcttttgtctatgttggagcctgtgctatttgaaactcaaagccagggatcaattcttttgttctctctttctcctatgttctcttttctctggctgctactgaaagtgggaaatgaaatgctgggaataaaaaacagaattgattaacaaatcaagatattttccctgtacagtagttactaagatatttgcaaataagtgcaatttgataactccaataattaggaaccattttaagacaaaaagccgttgagactcaaaggggcaaaataactgacatttcaggtgattactttgtcccacgatgcgcactgtgtaaagaaattagatatgttagtgactccctttaaccttcaagacaaacttgcaaggtacacaattattgttcccagtttagagaggacaaacgtgaggctcaaaacgggaagtaattagcttcaggtcacatgactaaaatgtgttagatacagaggtaaatttcagatccgtcaatctgacttcaccatctgaactcattccctgatgccacactgaatgagtaaatgactaagttgcatccaattcaattgggaaagttatgtttgtagcagtagcaaagaactttttaagatggagctgtgtttcgtttcgtgaactactgtttattgggcattattatgtgcataacattatatcagataatgagaaggtatttataagatatcgtccaccgcccctgccatgaaagaactcataaaagagtgacagagatcataatgaaaaggatacatgtaaggcactatgattggtgctgttatagtggtacaagttttgtgaagcaaagagaaattgatccttaacttttatccggggaagcagagaagtcttggcagaggaggttgctgttgaattctcttgaatgacagagcccacgaagcagaaagagggaagagtgtatgtgaagtctaagaagtgtgaagccatgagatatatgcattgtcagaaaatttctagaatgtatttgataatattaattaattatattaataaacaaactttattctgaacgtcttgtaaacattttttctgtagttttctaacatttacattgtatttttaagtcagtttccatatctgcaattgcgccaacaagatgttaggtggtagtcgcagaatacaagcttaaatggtttccaagagtctttgtgaattatttagaaaaagtaagaaaatcattccaccaaaatcgagctctacttaattattacatgttattagaggtgaaagagatctcagacattttttagttcaaagtttctaagacttcggtaaagtacaaacctccttttaaaggaaaaaattctctcaaatatcaaatataaaattatatttattaaaatattatttaaatttgtatagacagaaaacataaaactctttatgtttatagactttgaacaaaccgaaagcctaaaactcatttataaatgaaaaataagcaaaattatgagaccagagaaatctgaaataattgacattaatgtgacagaagattacagtacatgtaattacatacattaattcaattcttctctcctttttctcctcccaaactccaactaagccttcattggtacagtacgctgtgacagtgtttaagcatccttgttgtgggtgcatcatttatatatgtctggttctttctctcctcattagcccccaacaaatgaagtagcgttaccaagatgatcataaagattgaaatcaggtaaccatacctgagtagtcatcctgatgatacaggttgtgattttattttttcccacaatcatcaaaatgaaagccccaaatataaaattctcattaaaacataacaacaaccaataaattccaggagatctaaattctaaactaattgttttattttggagatggagctaaaatcatagatgccaaaggagtaaatatttgaccccaaactacataattaataatagacttggaactatatgaagaagactttattaggttttagaatgtttatcttccttaaaggataaatttgtgtattttaagaaacaataggtagatatgaataataacatctgttttgcatatacattttttattaaaaactttaagttcttgcttactttggaaaagagtggtttcaagtttgcaagcagggagtttataaaagcagctgagatcaaaagaaggaaagactggagggaaataacccagagaggagagtacagaagaagccacatctcaaaatgctccaaaaaaacttggtgacattgaaattttgtgggagatacatctgaataatgtctcctctgatttaagatctcattgtatatggaaacaaggtataattaaaagaaatcccataattatcctgtctaccatctacttaggataaagtcagccatcagtttacttgggtttatatgtattatctcacgtaactctcatcaacaccctactggggacataaaaatattttcaattttatggataaagaaactgaatctcagagaaattttgtagtttacccaagatcataaaggtagtaaatggaaaagctgttgtttaaatcaaagttcacctgatcccaaatcacagttctgtcccccataatctatctaccgctatttggtaatatgttaatacctctgccaataaaactcatattcgaatgctacatagcaaaaatgagtagatttatattgaataaaaataaacatttaataagggaaagtagttatggtatttttcttttttcctgctaacttatctgtggattgacacatttttcagactgtgggtgtctcaaaaggagtatattgtagaaaggaaacaaagtgagacaagaaagggagattaatgactgcgggacaagtcactgtggcagagggactttgcatggttgaaggtaattggagagaacagtgaatgttctctgtgagccaacaaagaaaggcagctttgtttatagccgctattggtctcaaagaaaatgcgttaagtttgaagattttaataggttttattcagatttaaaatcagagccaaaaatataactaattacttgggaatattttgtgtatcatttataagtaattgatttgtaagtcacagacacccatgtgttaaactacactgaaaacttccacatttctatccttagtccagaaccatatattgagacgcatgctagacagccctaagtctatgaggtgaggtcatcttaaatccaatatgtccgagactgacctcattgtctcccaccccgtccaaaacctgcttttcctccacaattttctctcatagcccttgaattatatcctagatatttaatattgcaatttatacatagtataatagttcttttattcctctgttcaacaaatatttagtgaaaatccactatgtgccaatcagcagagcttattaaaatctatgcctcagcaaatgcaactatataactatattactatataaagtaatgatacaggtagaaacttctttctaaggttttacaaatgctacacacattagcttaaaacaccaaaaacctgtgttgtgttacattgtcctttgtcacctccttcctgaagagattttctaatttctatccaagcgggtaaagaaagggaatggcctacaaaatgagttgccagcctctttcttgtgacttaggtacacctggccctcctgcactggcctcttctttgtgctcccatttttctgtctctcttagctttctatagattttcttttatcaaacatctcaaaaaaggaactaactatactcatttaaagatcagcatacatcctgtttaagaccagcaccctctgtgatctgagccattggagattatagattttcaatagccatagtagtattagttttaaaactgtttatactatttgttttttaatggtttgactaagataaaatttatataccataaaattcacattttaagtgtagaagtcaatggattttatcgtatctgtctaattatcactacaaactaataatagaacattttcctcacctccaaaagaaacctaatatgtatttgcgtactaccgtcccctgtcctaagcaaccactaatctattttctgtctctgtatatttgccgttttagggaacatttcgtataaatggaatcatacaatatgtggttttttgtgtctgttcttttcctaagcataacatttttgagattcatctggtcgtagcatgtattaatacttcactcttttttatttttgaatgtttcattgtatatgtatactacattttgtttatccattcacctgttgatggacatttatgagttacttccactttttcggctattgcgaattaagttgctatgaacatctacacacaagtcttggtgtagacatacatttcatttcttttgggaagatgcatagaagtggaattgctgaatcatgtggtcctgttaagtctgtgtttactttttcagacgtgtgatttgcttttttttggtagaataattagttgttttgttgcaattttgaggcttttggagtttcaaggccgaatggaaattgacaaaagctttgtggaaagtgtttcactttgtctcattgtgtgttcagctttgaattggctgtgtcctcttgagactggcaggatgtgtagtcatagtatcctttaaggaccctcattcattcctattcatggaatttcccaatcaggttccatagtaatttatttattgcacaaagtaaaactctaagagctttattaaagagttggaaattgtgtcttctttttaaattaaaattatttaaagcgagacgagagcatatctagagaaaaccaaatatatatttataaatgtgtatatttaacatctacaatatgaaatgcaaggcaatccatcttctgcattgaaaggaactattttcaaattaactcttgaagaaccagctttagtgcttttccctgaaatttgttggtgtctattatgaaaattattaggctagatgtccaaatgaggagatatctgatgaagacaacatataaaatataaaagctgaaggagactagagtgaatatagcctgttaaatagcctgttacctgcatagtaagcatcagggtccacttaaaagtaaagtgtgactattaatacaatatggaaaagggaaacagctgtgagttaaacaagataaattcaggattcagcaacatattgattgttagaatcttatttttttttttttcaatgcaagtgaattaggagcaaagatggcatggcactaagaaatgagagtaaaccacaagactggccataagtcaagaggggatcgcaaaacaagagtaggtgttcattaccaatagtctggttaatcgcattgttctggtcattgcttagtatattttgtccctctatcataaaaggaattcgaccttcccttgagcatttttgtgtatggtgaatttaaatctctccagagagtttgtgggttttaaattttattttagtaaacacaaagataagccaagtgaaatattgatttgtaagcccatgcagtaggatattgtagtgtatacattatgtattaggatttgtccaatttcatttttcctggtttcttgggaatttttgttttagcatctgtgctgaattttcttggccattatgtgcagcagtgtattacaactaagcagctatgaatgtgtacagaactcttcaaaaataacacctgcggcatctgccttttcatagctccccatagagaggatcttatttattaaagtgacttatgtactaaaatgaaataaagtcacatacatttgtggggagaaaacaaaaaatgtaaaactaacatttctcttgatggttgttagccatgagagaaaaatggagaaaacattaattctcaaactagaatactttttcttgcacactaatgaagcataaggtatgcattcagattagtggtttgtattccaggtattgcaaagcaccagtgcatatttcttatttcactgatgttttaactgaactaatttaattgaattttacttaattgatatattttttaaagaatcaggttttcttttaaagtttagacaatgtctacacctaacctgactgataaagagaagacatggtaagaaagaggttaatttaaatggagtatttctagtcttttattgctctccagaaagagggtagtataaatattttcatttgagagaagccatcttttaagtacatgttagtggagtgaaaccattctggagttctcctttgcctcagaactcaaatcaagaatttcccaaactaacccatccattgcattccctaaatagccactttactctctagactgtgaatgatcacccttgcataattcatacgcacacaccacttcccaagatccagtgtctgatctctgtcttaattaataaccctactgtcctccccgttatgcgtccatgaaaatttagagccatgtttaatcctccccttgtcctcccctatgccaccatatccaattatttctgaattttagcattcttttgttgttgtaacgtttcacatagttgctagtacttttccatcctatttcttccatcaaaaggcagtatcatgtagtggtgaaggacacagatgctgggttccttatcctagatcagactgtgtagacttgggcaagtctcttatcctctgtgcctcagtttcttcatctgtacaaggagtaagttgatgctggctgttgtcaggaagcttcagttcttccccacatggacctttccatgggaccacttaaatttcttcataacatggcacgggactttcccccaaagcaagcaattcaaggcagaagctgcaaggtgttttataatctaacctcagaggtgggacaccttcatttctgtaataaactattggttacgcaggtcactgtgggacccctcccacaaggatgtgaatactaggaagtgaggctcgttgaggtcatcccgggggccagctagctgttcttaataaggcttttgctctaaatctgccttttatttcttcttctcttgcattatactccggactcagctttcccttgcatctctcacatctccaacaatcttacagtcattaccagagcttctccttatcaatttctatgtatctcttatataattcaaatattagctctttgtcatagtggatattaatatcttctttagtcccatcctttcacttcatataatgattttcatcgtttgaggaagttttaatctttctgtagtcaaattggtcatggcttttcttgtggtttcttctatcatgcagaaaaatattttcttctaaagagttcttgcgtatttagctctagtttgggctagaatgctatttattatttttttcttatttatttattcattcattcatttatttatttttgaggaagattagccctgagctaacatctgctgccaatcctcctctttttgctgaggaagactggccctgagctgacatccatgtccatcttcctctactttatatatgggacgcctgtcacagcatggcttgacaagcggtgcgtaggttcagacccggggatcagaatcagcgaaccccggggccgccaaagcagaatgtgtgcacttaactgctgcaccaccaggccggcccctgttatttattatttttaaataaagttttgattcatttgcaatttgcttgccatctgttataagaaaaaaatctaaattaaaaagctttttcttttaatttttgtgatagctattctaccttattttcatttcatatattccactcatctcagttttctgatttttgtaaatagaacattagttatcctttataaaaaagctttgtcatcttctttatgattagcccatagtgtctctaattcagggtctttcggaaatataaactaggtttacaaacatgcctttgattgagtttagctaaataactgagttctcaatttttttctatatctctctcactgagatcataaatcttgaagtcaaaagggctcagctggatatgctgatgtttcggttgtgatgaaatttcctccttgtcatcctggggcacagtgttactgtttattcaactgcttttcgaattttagagggcatttgcattcagcttatgttgtcctttaaatccggtgcaaaaggagagtcaatccttttattattggaatacaagttaagtcacattctgattgtaattaagggccattaggaaagtaactcattttcctacaaattgatgccatttatgtctggatttggagacactgtaatatcatccactaattatgtagagtaatctctacttttattaagtatcatgtacagcacagaatttgttttaaacaatattgcctgctcaatcttaaaaattttattagagaaaatctcaaaagcagccttcatggtggaaagcaaatgatttgtgcagggataaacttttgtgagtgtgtacatatagccttttaaattattcatctttacttacaatgttgtctcaaaccctttacattttgtcccaaaacattaaataatggactgtaacctctaacttatacttctgcataagaagctcttttctggtgctttcagatgattttggtccatatgtctgtaatagtactcagcacattttattatagttagtcatttgtgctactgtttccagactaggttgcaagttggtgcttacttgagaagtttccagggacctggattgtcattgcttgagccacttggctgtttatttctatcatgaagccaggcttcttgccactacttacaatgctcttcatctgggaccttgagacctgaagctgagggaaagggaaccacactgcttcttccctcaatggctttctctccttcagtcagaaacctctacatgtgcggttgaggatggcagcggaagaagactcacaacagaaatgaaaagagatggctctgattccagatcctcaggggcattctttagtcataacacacattttcaacacagagcaggtagaaaagaaaaataagaaattgattactctgtgtttggaacttataatggattgtatatgtaacttaaaaatggcatgttttcttgctggtgaacaattaagtagataactatacttttttgactgacccctgccaaggcgcgtagagacattagtcctaactagttcttcacctgtaggacagcagatagcacacaggatgctattgggattgtaatacctgcctattgattttgtgaggattaaataaattggttcatggaaagtacctttaaattgattcatgaaaaatacctttaaggagttcatggtacatagcaaatgctcaataatggtagctatttataattattctacagatgcatgggagcgagtgaactggaataggcaggaagctggtgacagtagaaatggcataggtttcagggctggacaaacctgagtttgaattctggctctgccactgactaactctgtgacttgggcagttactgagcctgtttgaatctgagtttcctcaactgtgtaatgagaataacaattgctctttttcatggttatgaggattaagtgaggtttatgtgaaatgtacatccatatgtaaaataaatggcttggtactggggagcactcagcaaaggaaattccttgttataggaagtgggagacctgagttcaagccccgttctttccattcattaaccatgtgatcttcatgaaactattttattctctcaagcctcagtgtccttttctggaaaataaagagtgagataacatggtcttcaatatttgtacatatgtttaatctaacagttaccctttttgtattagcacttacctttcaaagtttaattatttgttaatgtgtttttcttgccatgttttatctcttagagttactcatctttgcacctccagaacccagcacagtgcctgacacataaaatttgcttaataaatgctcagtgaataaaggaaggagggaatgcatggatggaagcatacatattttcacaagaatgatgcattatgatattctagtacagagaaacagtgactatcctaatttcacacaagccatggccaagcatcaggagactggaaattggttgagcagaaagtccccaaggacattaaagatgaatagcattttcctctacacaaatttatttctaacacaattacatgtgtcaaaatcaagtttacttttactgccattgaagtgcgagaaataattggcactgattctattaacatcaatctgtttttgctgcataattcttgtaaatttaacatggtaatattttctcattagtcatttacccaactttttcacaaacatatttgagggaaaaaaatgtcatctttaatgttttaaagttgtaatacacatttgatttcaaattgattacttttcaaaatgaaacacaacaaatgatactgatgttcataaatgcaaaattctatactgaggttttttcttttttttaaatctttttattagaaaaacaaaactattgctataaaatgatttatgactaaaaataattttaaaatatcttggagaaaagtaaaaatcaataaaactttttaaaacatagaaggtcctatgcatctgaaatagcacatttcatgcacattgtccttaaacaaagccatggaaggcaagtttatctctgtcacctacctaattttgggggacatatgttgctccttttttggcaacactcacatgcctcagaactgggcattgggttttctgttgtccttgttttggcaaaatgtatctgtttcactgcctcattcattcagtaaataatcatttagcaccgtgatttgtgttatgttctggtatacgattgacatcatcttgatgagtacctttgtggagctcaaagttcagtgaaagagacagtatacaaataaacacacaggtaaatatatagtgaaaacttgagttccatgaagaaagaaaacagggtgtatgtttgaaaaaaaataataggggtgggtatgcggggctgctgacttacaatgggaggatcacaagacatctttcttgggaaggtaagtttatactgaaacctgtaagatgaggagttggagattgagggcaacgagttggagaagaatattcctggcaaaggaaagaggtaggcatattttagaaaccatatcagaaggatagaaagtaagagggagtgtgtgtgtgatgtgacacagaagacatagcagggatgaggtatgcagtggttggggtggtgtaaccaggtttgcattgaaatgctcactctagaagaaatgtggagaatgaactggaggttcaagaatacaagggaagataccaattagcatactacagtttcaacacccaagaatgaggcaatggctccatagaccaagaagggagtcaggagtagggagagaagatgaagctgggagacaggcagggacagatcttactggctgtcatcttgtggacaatgagaaggaatagaagaggtttctataataattttgtttttcattaaggtcttgtgttcacagtgtgcagaaatgatttggaaggtagggatggaagcaagaatggacgtgtgaagccctatagagagacaattgtggtcgtcctgggcgtagaaataattggacagatacaagagatatttaggagatagagtccacaggacttggtgccatatatgaaggtgaccaaacaccaggatcatttcaattttcagattgaaagttccacatcataggaaacccctcagtcccaggaaaatcagaatgtttggtcattccagatgggagaatgagaaatcatctgactcagatttttctaacatgaacaataaggtagatcatggtaccatttcctgtgtcagagccccaagggaggccaatttggagtggcaatggcttatggagttgagttgctagagaaacaacaaaatacatacttgaataaaaatttctggaactcagaaacgagatctgtgcagtgatagacatttaggaaatgtggatgtaagtggccaagaaaccatggaaataaggaaaatgaactagtgagattagattgtgtgagatgagaagtattagtcctgcgattttcaactttaagtgtctgataaggaaaatccagaaaaagatattgagactgtatggctagagagaaaggaagaataaaaggaaacaaagacatcatgaccatttcaagggaggactgaattgcgttgaatgttgttgatatacaaatatggtgataactgaaacttgtattttgagacatgttagcaagagcaatgtttacagattgatcaaaatataaacctggttgtgttgggactgtgttgtgaagtaaggggtgagaaaatggagatagcaagtgaattctgctttgaaccctttagctataacaaatataaagaagctttcacctgaaggggcgtagggagcattttctttgttggattgtttgagagagacttgagccgacaaagagagagaactttaaggaattggaaaaagagacagcataaggtcttaagaaagaaagaagagaaaggatctagagcgtaggcagaagaatttctcttagctaggagaactgccttcctaattgtaacaggagggaaagaaaaaaggaaagacacagggatgcatttcaaagtcatattatatgtaaaaatgtgcttcataggaaatgtttcgttaagcattcatgtgtaaaattatccttcaagagaaaaagtagtgtactcagcacaatgagtgattattatatattgtatattcataattgaatctgttatatctttactatctgagcaattatttttaaaagtttcagtaacatttattgtaagcaaacttattgcaaatctagtgcatctgccaggcattcatggtgtagagctggcactgttgctgctatcaagggctggcagtgtagtcatggaaacgggcatttaaacagatcactgcaacacaatctgacaggaggtgggactagagtgtggtcgaagtaaagaaagtagggaacaacttcataagagagtcacatgaatcaggatatgggtttagccccctgaataagagtaaaataactttgactttacaatatagaattgttgtacactcaaagggtgggtaagtggaaataacaggactgctctgttccatgaggtcatgcagggatccctatttttataactttgttactccattatatctaaataatggaacctggctcccaccacaatactcatgttccagttcacaggaggggagcagaggaaatcgaggcacatcgtttatgctcagatcccatatgcccagctaaaattctatcatcatgggagatgaggagaattcctcgtgggggcaaatgagccatctgtcacaggtggtgacattgatttaaatcttcaaggatatgaggtatcagggagactaagggatttctggggtagaggactaacatatgtaaaggcaaaggaaacatttagaaattttaacaatcatcacgtcacaaattttatagtagactcctctagtgcctgtgttacttcttcagacaatctctactatcagcagcaggtgtggtggacagttccacagaagctgagattcaccttgcaatcccaggatttacctcattgctgactgcatatctttctgattcagtctcttggccttgggtgatgtccttggagctcctttagcctgtctaaaagtactggaagtggatagaaatcaataaactcaaccaatgatggaaggataaaagctttatctttctgggtaattctgggagcattctggatgcaccttggaggtcttcacatatttgagcttctgattcctcagcagcaaccttggcaaagcacatttacgctggctctcctccatccctatatcactctcattgccatctcactcctgctccctgaaatcacttcctcaataaactactaaatggcatatatatatatatgatataagatcatatatcataagatctgtatttaattataagatctgtatttaatcctgtagagtgacaggaagctgacagtggtgaagttttttctgtttgttttctttataatttatgccttttagcagaggagtcatatgtctggattgagtttcaaggaagtttgtgttgagaataaattatagggagcaattctgtaggaagagggatctctgaaaaggttattttggacatccaaatggaagacaaagatctacataggggctgagactggagccacagcattgggaatagaaagaaagtaatatatattctagagaaaatggatgaattgaaatgacgttaaaaatatttgacaactggtcctgcaagacaccagctagcaagaatgaaccttgactataaagccccaatatgccagaactggtgcatcttgacggattagcatcctgggtatgaagcatccacactgagaagcactcaatctattttcagatctactataatttctcctaactttctgaatgacttggaagaaccgaaggacttggaatcctagccctatgtaatgccatttagatttatgtattaccctgctattctgatttctctcattttaaggatttctggaaaaatctattttaatatataaaaaaatatatgaattgtcctttgatgactaagtcatgattggcaccacaccctgagaactgtccacattaaccactgcatttctcacctaccttttcttttcagtgagtacaaaggctagccggttctgacatgctgacaaagtgtgtgtcagagcaggtgttagcacactgatgagaattcaggcaagaattaacattcctttcaggataaatgtcctttattcttttctggaatgttccagttgtgcttgagcctctgcaatatcggattgattttttcaacaagtatctgttgatcacaggctatattccagcaatcagaagactatctcagggccaggaaattgaaaaaaaaggcagaatggatgaccatcaggagctttataagcttatgcagaggtaaaatgtccctttattttctaacgtttatctatatttcctattatttcacagagatagaagtgagtattcagtgtttttatgctgcaatttcccctgccaccagtttcagaatttaaaagaagggagttgtattaatttctgtggctgctgtgacaagttactgcaaacttcttggcttaaaacaccagaaatgcactctctcatagcacaagaggccagaagtctgagattgatgtgtcagcagagctacactccttccagaggctctagggtacaatccattccttgcctcttccagcttctagtggctccaggcatttcttggcttatgctgcctgacttcaagctctgcctctgtggttacattacctcctcttcttctctgtgtgtctccatctacaccaagaaacccagagggaaaccgatgtctccctcactcttgtaagaatacaggtgattgcatatagggctcatctggatcctccagaataagctcctctcaagatccttaacttagtcacatatgcaaagaccattttctgaataaggtaacagtcaccgcttctggggttaggatctggcatatcatttttggatccatgattcaatgcgctaaaagagtaaagtctagctatttttaaggaggaagggaggaatggaggggcagagagagtaagagagagaggatggaaggaaggagtgaaggaaggaagaaaggaaagaaggaagaagggaaggagggaaggagggaggatgggaggaaggaaggaaggcagaatatgaaacttctttaaggataaaataatctgatgaggctaagaagagtctttatctacagtcaattcccacctttgcctgattaagaaacacagagaaaagaaataaaaaggagaataaaagcaagtaagaccaatatgatgtaaaatgaagaccacagactttgaaactaatgagacctgaatccaaataccacttaaatgatttactagctctgctactctgggcgtatctttaatgttgcaataatgcttaaaatgcagagttactttagcacccacatgaaattatctatatctatctatatctatatattgatacatatacaaatattctggcacagaatatggcacaaagttttgatcctcatagagtcatttctctcgaaagtattcagtacacactaatttagaagcacatttttcttctagaggagaccagattcagagccatcttcttcagctctatttgaattagtaatactggcttaacccattgctcatcatttcttcatttctgataatgactttatgtaacatttttttttttttctgtaagtctttatgacttctgcctcttacctcagacactgtaaatcccagtggtatccaagagaagaggaagtaagactactctttaaggcagatggctgtgatattgccgtaataaagcaagtttgttgggttagaattttttggaggcttgagttcatcgtaactcacaataatccaaatggtcagttaatggggttgctctttgagtgatatatcattttaaaatatgtggcaaagggtacatcaaagtttatacagaaattctcttgggtgtttttgctcctagaagctttctttgcttaagtgctgctaatgacagcctccagtggaaatggaagtgtttggctaatgcattctcaaaatgggagttgtcagctcttaggggagtctcatgtgccttgatgagctatcaacctttgttttcctttaaacacctaaaattcagtgggagaaaaaatcattacagttatttctaacacagcaaaagagaaattaaaaaaattcactcacaccaaaggctaaacaaatctgaaaaagtcagtttatgcattagcaggatcaattcagatccgctggaaagagtatactgcttgtccctgaaagcatcagcgatctgccttttcaaaagggaagtactttttcagtgcgagattagtggcatcagaagtgaagatttatttcatcatttgacataaagctttgaaaagtttgcaagctgaagacattgttccttcagtaaagtatgctattttcaaagatcttcttcaacatcttaatgtatgagccattgtgtttttctgcttgtacataaaaaattccctgattactctcttaaaattcagtgagctgttcaacagaattcattgctcttctcttagtatagcatgcatgtgatgtaaggaaagatttgttttagtatataattaaattacaaatattatatggtgatttcaaaatagtgacaaaagcagaaccatgtgaatcagcattcttattggagagactaaataagaatttctatggtttaggagatttaatttttcctccttctcaataaataattttttattctatagttttaacaaaaattaaaactgtatggacagtaatttttaaaaatatcactaaggttaagagcagttgaccttaactggatttcatttcttgtgccatgccaggatatagtaacctcacaacaatcataaatgttttgagattaattgcatatatatttaaaaaaatgaacataaccactaatgagaatcctattaattttagaacataaaatattgattcctgtggcaattgcatttgtactttttctcactctatttctaaaacactaatcagctgaccattgtcatcagaaaaccctctgaggtcaactttataacaacacatcacacattagtagagagctcctagaagttcagaaatgctagctccagtcaagtctttgcacagtactaaaattcagtccgcacagtgcgtcatgcttcctaatcaaaaagtagaccctgtaaaacagactttatgggctaataattttaaaaaacatgcttgatctgatgtgatttaaattaaggttgaacatctagagtgaaagcataaaaaaatctgaaccccatcaaatatttgtggagaacattttctcttaattcagtggcactcttttaggcttttgttaatactttgtaggggggttgcttgactggattgcgggtgacttattttgtttcttgaaattggcacaagtggaaaacaccattggtagctcaaaatatgtttattgagcacctatgatatcctaaacactagcctagaaactatggtaataagaatattaatatatgaaaaataaacaaacaaaactcagatcaataactttttgctgaggatcttatatcttaggaaacgattcaatatagatgaaaacgattaaataaaaattaaactgtcaagtgcagcaaaaagttataaagataaagtcatctgtggagttagaaaacagaaatcttattatctagaaagagaggggagtggaaagacattttttatggaagaggtgacaactgaactgatttatgaaataactcagcaatagttataatactgaaaataataccatacacttttatctgcttactctgtgcccactgttctaaatgctttcacataccttatctcatttaatcccctcaacaaccctttaaggaaggtattattatagtctccatgatacagatgaggaaatagtggcacaaaagttaaataacttgctttcattgaactagcaagtggagaaatggaggagcaaggattcatctctggcagcctgactcagaatctgtgaatttataatctgccactctgagttgcagtgtgtattagcttcctatcactgctttaagaaattaacacaaacagagcagcttaaaacagcacaaatttattacattgcggttatatagttcagaaatctgaaatggctctcaatcagctgaaatcagatgtgatcggggtatattctgaggttctagggaagaatctgttttttctgcctttcccatcttccagtctgcccacatcattgacctgtggtcctcttctatcttcaaagccagcaattacatcactttgcccgctgcttctctcatcacatcttctctgactctgcctctcctggctccctccttcacttataagaacctttgtgattacagtggagccacggcagataatccagatgatttccttatcttaatatcagccaattagcaacctttgttccatctgcaaccttaattcccccttgccatataacaacataatcacaggatctaggacttaagacatggacatctttagagttctgttattctgccttccacacagaacatgagctttggttcagtggcaagaaagagaaggatttattgagggaagggcaatctggtttggtaaaatttgaaaaggggcagttcacgaattaccaaagaggagttcaataaattaatctctccaggtctctctataataatctttaaaggcgagatagttctttcttcccacctaatttgaaatatgtaaactccatagatatgtattaagcatttactatgtgctatgggggggacataaaaacagatgatatgcttatattgtagttgggtcaacatttaagaatttaaatgaatcagttgcgtgagatgccaaaagagtgtttcatatgtgttgttaaaatcatggaaaatttcagaaagatgaccttgttggggtcactgaggagtcttcctgtaaagtacgcttttctttcctgcctcaatacagagaaatctgagaactaaggactaaagatggaagtcaaaccatgactaggttggagagcatgacttacaagtacgggtaagtgatgctgcaaatatgaagcacaaattaatctaggttggggcagtgtgacctccaaagggcaggctcttatgcaatctattaatctacagcgtggagtgaaagaggaaagaacacgttcttcacaggcatgttgcttcctaatggaagagtaactctgcgcacgttactattcccagttttaccaatcaaataaatcattcacctccccaggggaaaagtgagtaaatggacagagagaagccagaagtttcatactagcagttttctcttcctggcaggacatatgacaagtagagaagaagcatttccccatcatacctcaagttcatcctgacccaaagtaaattcatcatttcactatctacctagttacccaaattagacacttgagaatcatctttgacttctctctcagtaattgactcattccagtcactcacaaaatgtgaccttttctcaaatgggttccatctaccccatctctcctaatgtgtcatcattttgctgaaataacttgcactggtatccttacatcattctctccactcaactatgttctctcctgctaagtttatctaaaatctaaatctaaatgtacccaagccaccttgtctctagagtccccatcagtgactctcttctaatctaagacatatcaggaatcttctactccaggtatgctttctgatactcagggtttgttagtgcccctttctatcctactatggcatcctggtctagttctaaaatttcactaatttcagtacattttaatcaatattgtcccctacctaaaagatgagattaatagtaatgatgattacaacataataacaatattattatattatgattaaaaagaatggctcccatgtagagaataacttactctttataatcatatgtgtttttctggatggtactaagtatatttcgtatatgaaacaatgaattttcacaagaatcctaagaaatagacattactttgtctattttatccacgaggaaactgagactataagatttatttagagtcacataactaataagtagcaaatatggagtttaaattcagggcactctgattacaaaacatgtgaattttggctttgagatgctcatccaaatactagcagataaacaagcaaaatagtaaaagtggtgtattttgaactttctatgagctggtaaaggaaccctagtgatagtaagcaatttttatgtaacttccaagtcttctgccctataaatgaaaaagctagattagatgatttccagtgtcccagtgtttatgcaaagatgtttagtttttcttttgcttttttcaaaaacaatgagatgaaagaagtttatggaatttttcaagaataagaaacttctaatcaaaggctcttgtcttagtcctgtctggatccaacccatgtgtgaaacaggaaaacactccatcgcagattaacccttcagatcaccttgatttactttaaggcaatagataccaaatagttggtgccaacacagcttagctgaatattggaccaaaacccaaatacttctttttaactaatgtactcagatagtgatgacttactccaaaactcaaaatgtatgtgagctgtttaggatggccctttaattcaccaccagtgtttacactgtcaacaagatatctcagtagctgccagagccaagttgtattggataacttcatcacttggggtgactaatacaggcatctttgatcttctcgttctctgtacttctttaatattgtaaagttaaagagtgatgatgagcctataaaagtcatgtagtcacttaacaattattccttaagaatctattatatgtctatgttttctaaatgctgaaggggaaacagaaaagcatgagatttagtcctttgctgagaagttacaatccagcataagagggaagatattcatgacaaaattagaaaacaatacaaggcaatatgtaattaaatgcctaattttatgttacaggctataagagcaagaggatctcagtaaaagatgagagtagagtgggctggaattgtcagagaaagttcacgggggaggtgaggatattggtaggatcctgaagaatgggtaggagggaatgaagggaaatgatgggatggcacacatggtgtatatttaggagactggtctggtggaaatagatgtcccttgttggaaagaaatgggaataaaatggactctttctcctttgttcacatcacgtatctgaactacgttggacaataagtctaattgtaaaactttcagagaaagaaatctcgtaactaatttccttgtcttatgcaattacaggcaattctttatcacatccttgtgtatgtagtactactgccttaaaaataatcttttaaatgtattaggtctattgtatttgcactgcctggacttatgatcgctgatatttccttcaagcattttttactgtattgccttccattttgctgggtaaggagattattcataaacatttcagtaataatgatggagatggaaatatcattttacttttatagacagctgaacaatttgaaaaatatttgcacaaatactagctcatttgatccttaaaacaatcctgagaaataggcagagcaggtgtaactaccactgtttcacagatttggaaactgacactcagaaaagttaagagactggctctaagaaaaacagctgacgttagaagaaccaggactcaaatcttctgtcagaacttatcaaaatgcctctaagtgacatattgccatgcaataatgagatacggaaagtaaaaccaaacttagcatattttccaacttctaccttggctcagtatagcccaggtattattcagcccatcatttttgaatgatttaatcaccattgtaattcattgtattcatatgaagacagcctaatctttaaaaatctacacatttggtacaaagattagttccatacacaaattgaccaggtacaactgaataagtcacttagcgtctttgtactactttctcataatttcaaggggaggtagataccagcttgttgcaaagatataataaagcagggaatagaaacacacattgaataaaagtaacatttgctctataatttctaccttctgcttccaggaaggtggagtacatgtactttcctctattccttccaccactacagctaaaaacctaaatatgtaaaacaaacacaagaagactctaataaatatagagaagaaagcagatcagctagagaccactggaccctcgggattacatagcaaggaacccagcaacttgaaaccaccaataggtgcagacaaaagaagccgaaagcaaagcctgctctctctagctaaaaaacgaggacaggagcacccaagcaaaacagaaaattttcaggtgatagttctactccagtcaaacaccactgaaaaccactgtggccccattttcattcctgtcagcaaaggactagtggtaagcctagacttccactcttgccaggctgtaatgagttaccccaacaccaccagggtgatgttagagaaggcccagcagggaaacccaccctaccaagtgtcagtagagacaacatggggaggctggacatccagccccatctggtcgacaactaaaaatttttgatgaaagaaactaaaggagatctaaataaatggagaggcatgcagactgagagggctgaacatagaaaaaatgtcaattctgcccaaattgatatacgggcttaacacaatttctattaaaataccagcaagatatttctacacataggcaagattattctgaattttatataggacgccaaagaaaccacaatgcctcaaatcattttgcaaaagaagaataaagtaggtagaattactctacctgacttcgagacttattatatagcaacagtaatcaagactctgtggtattggtagaaagagagacacacaaatcaatagaacagaatagagaacccaaaaatagacccatacaagtatgtgcaagtgatttttgacaaaagtgcgaaagcaatttaatagaggaaggattgtcttttcaaaatgtgctggagaactcaaacaacaataagcaaaagagaaaaataaagaacctcaacctaaattttacgcctcatacaaaaatttacttaaaatggaccatagatttaattgtaaaacataaaactataaaagttttagaaatcaacatagaagaatatcttcaacacctaggagttcttagacatgatcctgcagtgatataaaacttatcccttcttcccttctagtttctttggctggtctaataattaagctgacataagatagattaccaaaagaaaaacaaatttaatttcatacatacaggagcccaacaaagacgtgaaagtccccctggcagtcaagtaattgaggcttgtataccattgtgagccaaagagaagggctagggaccggagatctcaaaagggagggagacaaatcacaggcagatgaaaagagcaaatgtttggtaaacaaatgtttgccatgccatgctgacaagtctttctgatataaaagttatctttggtattagctctcttcctggtacaggccctctgtctaaattcttttaggcagtgaaggaagaggtgaaaaaaactcttcctgagtctgttatgccttagttgccttcagctcaaaataatccacatgacaaagtggcatattttgggggtggtgtattcttctccccttcaatccataaaagaaaagaattagtacataaacttcatcaaaattaaacatcttttgctctgtgaaattccctattaagaggaagaaaggcaagcaacaaacagagagaaaatatttggtaaccacatatctgataaaggacttgtatctagaatgtataaagaaaataagtttatgcataagaatatataaagaaaataaatttctgctaagcacaaggaagtaccctaggactataagagctatccacaaaaggatgcattcttgaatattccctattagtatagtctaccctataaacaatccacaagagtgatgggttcaatccacaaagggtagagttcttctaacgcttagatctataaaaaaattacaaacaatattaattattcacttctaacgtattctacctatactatactatttttttcaatattcttgaaaggaatttcacaagcaactatctgggcaagtaggtactatctaaattctaaaaatcacgaatattaaaatacactattattattcttccagggtcatgctgggaagatataatttatattcacattttaaaaataaacagtaaattataagatctattttaactcatttgacttttgcatttactatttttaaaaataaagttcttgagttacatagattttgacaaataataccaacttgtaatttctcattgtaataacagctagtaaagcactccattatgttgtagttttaactaccatgatattgtgcagtcagcgtgttggaaagataatatagtcgtgttattcatgcttgtagaacttggaaacaattgttctctagcagtgcattaagaaaatcaattaatagtgaattaaagcaattagataagttgttttagacttgagatgctagaagcactgttatcttgagttgtaaatcaagccaatttcagtggtagatgggtcttgtcatgtgcatgaaatctttaaatgcaattctagtagatcttaatactgttgttggccaaaatcaaggttctaaaattattgttttcccaagcccagccaaagctgtgtcaggtactaattttcatggcagtctcttcaactagatttagtactttgctggcttagggaagcttaatcttttaaagatgtttgtaaattacccacaaaccattctgctcagagtgcctcataaatccttcctagaggatcaaacttgaaatgaggagcaagctgacattaaaggggaagtaatgtgtgactatgtgcttgagaaccaaaatattgggcagccaaacaggctgggaagtgagtgctcagaacagagtggatatttgtaaatgtttgttgagtgcctgaatgaatgcataattgagttaacgaatgaacaggagctcatgtctttaagattaaaatattggcaatatggtttttaaaaagccataacattctgaagtgagatgctgacccacattttggcattcacttatttttaggggcattggtgattacttgtactgacaaatcattctttatttatgtctagtttcttatttttcaaagtgctttcacatacaccacctccttttgtcttcacaacacaggtcatgagggtctcagaaaagtgtgacttcctcatctttatgtcctcactccctagcccaatacctggtacacttacgtcttggtctaccagattccaaggcacattctattaattgctatgacctaccattgtagcattttctcttctttttgtgaagacaaggatataaaaatgccaaagcactctttttattgatcagtaattgtaaagcgttccctttgaatactttaacaaaaagtttaaaagccacttgtcagtataatatatttaagagaacatttctttttccaaagcagaaacataaatgattaactaaaggccatatttcttgtcaatgtatctaattttatcttggaaatatttgtactaaagtgggtaaagtagtaatgtgatagtaaattcccatatgacaggctgtcagtatgaaattgttggattagcaagagaagaaaaaaattactattttagtgacaatccttgaaatggaaagtgaaaaattatacagtttaagaattaagtatgtctaagcttccattccattacatttttctaacactgggatgttagtatgaatctttaaacttattgaactttaaacacaaagttgtttccttgacattgacccttggatataggtgttcagtttgggagaaaattaaaaatatttcatattactctagactcaagagtcatgtgattaataatatcatgcatgaataatgcaatttcgtacttcctttctccaaaactattatgtatcttagaagttctttcaaaatacttggactgtttattgtttctcctctttcaagtaatcctagactatattccccagaatcaggagttctttcttaaaatcctgggatttggggtaagagtggatctgaacaatatcatgtactctgacatttctatcaatactcaaccaagtattgaattttctttacggctcttctcttataatcataatgcgtagttacattgataataatgatgatgatggtaattttacactttttagccattaaatgccttgggataaagtaaaaaaatgaatatataccagctatcagaatcttagattttattggcacaaatttttctctaatgcttggaattgaggcaatatctcatttcatgctttcctcagaaagattgcaacatgtattgtaattcaatataatatagtattttttttctctttaaagaattccccccagacacacacacacacacacacacacacacacacacacacattgttatggaaaacaaagagatttttgatgttatttagtccagagccctaatattaccttcttttatatttaaaatgtacccttctctccatccgagccccatcaacaataaccacacagtgagatctgcagaagcaaattatccaaattttacttactgatggtgctggttgctatagagggactctggaaaacaacgatgttttctaaatcaattatttgagatgaacaaaagggacagagagaaaacgacctgagtttattccaacatggtgatcaaagaattgggagaaggctgatgtattagatttttataaagtaaatagtagtcttctgtatgttcttgtatgccacaacataataatggaatctctttctcaatctagatgggtgtgtctttgcaagtgtagaaaggaaacaaagaggagaagaaaaaaataataagacaagtagtttttgtttttaatttaagagcaatcaaatatttacctggatcttgggaaaacaaaaaggagttggatgttcttaatacacagcaaaatgccatgaaagtttgattgatatctcttgcattctccttgtttctcacacatcccagcaatcatttagtgaaaaacaagacagctctgctattgagtccctctagtgaatttctcatttcaagtattgtattcttcgtttctgattggttcttttttatatttcccaattctttgctgatgtgcttactgtgttcatccattcttctctgcatatctgtgagcatcctcattatattttgtttgaattccttgtcaaggaggtcgctagtttctgtttcacctagttctttttctggtgttttgcagtgttcccttgcttggaaagtattcctttgcctcctcattatgcctctttctctgtgctattttctttgtactaggtgagtcggctatgtctcctgatcttggagaagtggccttatgtaagagatgccttatgaggcccaacagtgtgcttctctctcgtcatcagaccataagaaccaggagtgacccctttgtgggctacttgtgttcctctgctgtggcagggttgctcctactgcaggtacccagggaggctgatcttttcttccctggccagctgtttgtaaatccggtttgtaggggcctcagcactgttgactacaaagtctatcagcacgctcttattgcaagtgtcctcttaattgggttggtacccagtgtagctggttgctaggctcaggggcatacagttgtgataggcctgaggccaacaaggctgatgtcagttctcttaggagtgcagctgagtggggctagcccttggcatgggggcactcagttgttccaggctttggaaggtggggctgatcgtttttatggctatttgtgaagcacaagtcttctgccactgataagcctcaccgccctctggaccacatacactgtcaacacagtcctggtccatgcacacttctcaaccccctggagcgtaccccaccgccacactgcagaggcctccacctctgccccaataccccccacagttctcctggtcttcacacaggtcctgccccacagaggcagacacccttgcctgcctgtagaggatcaaggcactcagtcaatgcaggctgaaaagtagcctgagggcctgctgttaggtggggccagtccctagggcgggttgcctgccctggctgaactgggttaaatctgtgctctagtgggtgtggcagacccctgggctaacagcctaagggacgcacctcaatggccccaacctgtgtccatatcagcacgcctggaccagctcagaacaacggcccccaccaatgtctcagtctcaggagaggatcctcctctcaccaagatgcccccagggcccaccaggtgagtcttgtttcaccaaaggacagtcagccttctctctggtgattttaggttgctgcaatgagtgagtttgtgcgtgggccctttaagaccgggatcttttcggctttcggtggatagcttttctggggtgtcctcactgcagttaatagccagcaaagccagacagtaagacccccctctcagttgggctgagtccaaggatggtcatagcagtattgcccccactccggacctcactcctccagggagggctcgtaccttacattggttcccgcctggccagctgagaagctccgctgctcccaaaggtggctgttttcctctccggccagagttactgcctcttctgctttcatcaggactgtcccttgtcgtgggggttctttttatccagttttcagttttcaatccagggtgattcttcccaaaattgttgtaacctggttgtgttcatgggaggaggtgagttcaacgtctgctcacagcaccatcttgacaagaaccatcaacaaaatgaaaagacaacctaacaattgggagaagatatttgcaaaccacatatcagataaggggttaatatccaaaatatacaaagaactcatacagctcaacaacaaaaaaaccaacaatccaattagaaaatgggcaaaagatctgaacagagatatacagatggccaacaggcatatgaaaagatgctcaacatcattagctatcagggaaatgcaaatcaaaactatgatgaggtatcacctcactccggtctgaacggctataattaacaagacaggaaacaacaaatgttggagagggtgtggagagaagggaacccttgttcactgctggtggcagtgcaaactggtgcagccactatggaaagcagtttggagtatcctcagaaaattaaggatagatctaacatatgagccacctattccactgctgggtatttatccaaagaacttgaaaacacaaaggcataaagatacttgcacccctatgttcattgcggcattatacacaatagccaagacttggaagcaacctaggtgcccgtcaagggatgaatggataaagaaaatgtggtatttatacacgatggactactactcagccataagaaatgacgaaatccagccatttgtgacaacatggatggaccttgagggtattgtgctgagtgaaataagtcagagggagaaagccaaataccatatgatctcattcataagtagaagataaaaacaacaacaacaaaaaaatgaaaacacatagcattggagattggactggtggttaccattggggaaggggggaggggggagggcaaaaggggtgattagggtcacacgtgaggggatgcactataattagtgttcgggtggtgaacatgatgtaatgtacacagaattcgaaatatgtacatccggaaaataaataaaaattaaaaaaaaaaaaaagacaaaacaaaacagtaagcctttcttccttctctcttctctttattttccaagctctctaaaaataaccagcaactaaggatcttctatttttctccctcaccaacatttacttcatttggtaatttaagtctagatagcctatctggcctctttggtgttctctttcctcaatgtgtattaaaaggtgatatttctttaggatttattttcttttgactggtggaatataaccaactttaatttgggaagataaatcagtctcaggtcattgttccatgtctcccttggaattgtatcacgttgaaatctgaggttggcgtctcctgctcagtggtatttatcacaacctctatagcacaatataaaggatacaggtgaagataatcagtattgggtgagagaatagggggaacattggtgaatgacagatggaaaaaataaatgtgtaagactggcatggcttactcccctagctccaaatgtcaaggagcaggatttgtttactgattccagaatttaaaatatttagcctttattgtgcaatggatgatgtattagtttgctcaagctgccatcacaaagttctataagctaggtagcttaaacaacagaaatttattgtctcacagttctggaagctagaagtccaagctcaaggtgtcagcagggttggttctttctgagagctgtgggggagaatctgttccaagcttctctcctggcttctggtagcataagtgtgtccttgtagatggtgttctccctgtgtcttcatagcatcttccctctatgcctgtctgtctctatgtccaaatatcctctttttatgaggaagccagtcatgttagattgtgggcccacctctaaaccaacgtgaccaacaaccgtgttcccaaataagattccattttgagacactgagggctaagacttcaacatataaatttgagagggacactgttcaacccattactgatgatatatattttgtttacatagcatattccctaaaagggaatcaatttataatggaaggaaagatttcctatccatttgtgtgtgatttgcttgaggacaagaggtaagaagattgtagttatcttttcatctacatcaaataacacagggcatgtcacaaaataagtgctaagtaaaggctgaatgaatggatggatggatggatggtgtattactcatcatcttagtttgcaagggctgccataacaaaattatgttatgttacaacaagattgggtgatttaaagaacagaaatttacttctcacagctctggaggctggaaatccaagaacaaggtgtcagcaggtttgctttcttctgaggcctctctccttagcttgcagacagctacctccttgctatgtcttcacataatcatccctctgtctgtgtggtctgtgtattaatctcctcttcttaaaaggacaccagtcatacgggattaagtcccactctaaagagtccatttttaactgaatcacctctttaaaggccttatctccaattacagtggcattctgtggttagagtttcaacatgaattttgagaacacagaattttcagcctgtaacacttgtatatagattaagcttgttgaccttaaacaaacagccagttatttttccagcaaaaatgagtttattcaggatcagcaaagaatttcaatttgaggtctgcaactagagcaagccttgtacaagtccccagcagcaaagggaggagaaactcttttttagaggggaataggaagttgagagggctattgtaaacaaagcgtccattgggggaattgaaagttggaagtgtagtggtttttcattgactgagttgtgacagtctctccttgactgaatttcttgccagacaagaaaaggaaggctttcttcttcctgttgggctctgctattgatgtagggcaagggagatccctcttttggcctctcaactccattttaatgaggtttctgtttgttagtttccacaagctcctataacaaaaagatcctaaagtacagttgaatcaaagaaaatacaagtttatttatcttttatgtaacaatgcaggcatacctcattttattgcactttgcttaaatatgcttcacagatattgcattttttacaagaccctcctccagcaaaaagattactacttgctgaaggctcagatgatgtttaggattttttatcaatacgatataaatttatatataaactttttttttttggtgagaaagattggccctgagctaacatcttgttgccagtcgtcttcttttcactgaggaggatcaaccctgagctaacatctgtgcccatcttcctctattttgtaggtgggccactgccacagcagggctcaacgagccgagcataggtccataactgggatctgaacctgtgaaccccaggctgccgaagtggagcatgcaaacttaaccactacaccaccgggctggcccctagaatattttttaagttatgtacattgttttttaaacataatgctattgcacacttaatagactatagtatagtgtaaacatgactgttatatgcactgggaaaccaaaaaattcatgtgattcactttattgtgatatttgcttttttgcattggtctggaactgaacccaccatatctccaaggtatgcctgtaattcagaagtaggcaggagtccaaactgattaatagcctttgttatgtaacaccatctaaacacctagattccatctatcctgtttgcttctccatcctttatggtatgattcccattgatgtggttgaggttggctcaccaccttgctttcaactttccagacccaagactaggcactttttcatatattatgtcatcataattataataaaatattgtgtcataaacaagaaaaattatgaatgcatagttcaagtcaataaacaatttgtcttgcttttcttctccaaatgggagggtccagaattatttaagacattgattaaatatcatgctctctcgtttaataattcttgacagaacttcataacatgtgttgaaggctctgaacatattttcaaatggttatttgctgaatattgatgcactgtgaaaagccaaatcccaaattataaaatgtgaatcttcaagaggatgaaattgagcagtttctacccatcctacttacaacataatatcttgccacaaatatttaattcatttagaaatttaatttgccttactgggaaaatgttataatgttaaattctattcaatcgtttaaaaatatgcatatattttaatagacttgttatcttgtacccaatttgttgttaacatacatttccccatctttccataagaacttctaacattcagcctcaagtctgcaatatggttaaggtaatgcctgctcctgtaacaaataaatatacaaatagaagatgtttttactcttgtaaattctaaacaggcacttctgattagtgagaagttttctttcaagtaatgcttcaaggacacagtctccttccatccattgcttttgtgctttccctaggtttcagagtccttagctaacagttgcatctgaaaagaaagtggaaatggtccccatgcttcttaaccacttttgcttaagacaattcttttggcagaaactagtcacatgacccctttatatgcaagaggtgcaggtaatcaagctcttggctgggcagccacttcctaccattactctgcactagagaaggaagcacaagtatttaatagaaggccaattgtctctgcaacaaatatttcatttcattgagcaatacaatgacttatttcttagcatccgtcctatgcacatgatttctccaaaaataaaacggtaagttatgtccctaattttgtgtagagagataatgctgagttgagccacaaggtcctatctactgaaaaatcttccttagtcaattattcagttaatagatattatacatctaattgttttaagcctgctatcactcagctcaaatctgtgggtaaaccaattgtcagaagagttgtccaaagcctctgggaatgcatttagccaatgatctcattctttattgtaaaatttttagcaagtacctgtagtatccaaacagaacacagaaactgcaacttccgagatgtaactaaaatgatgagacagaatttttacagtatccaatgacataatcttaaatctttataatcacagattgtccccatgagacaaaattggttaggacataaaaaattgatctggcatatatttaataaaatatatttatattttattgtaagataatgaggcataaatgtgaggttttcttaggacaaaggccaggctgtaatcaactctctgtcctggtgtcttgcacactgcctggcattgtataatttctcagttaaatgatactgagtgactaaaagaatgaaaaggaaagaggtgaatataaatgaactagcaattatcattcattttactagggtttttattttccagttctttctccagttctctagaacctagcattagcatcagaatttataatttcccttcttctctagctcatgatacactctcattaaaagcacaaagtccagatcagttatcaggccctcatctgggggttcctttgcccaagacttaagactcccactgccctccttttcttatatcatctcaggcctctcttccccaggtgctcctagaacagaatgtcaggggattcctacctcaggcctcagcgcaagaatatcctaggtacggagaatcttcaggcagcagaacacttaaccgacgtaactttgtgagtatgagaaagaaggaaagcactagattcctgacgtagtttttgaatggctgaggccaaccaaggatattgggtcctccagaagtttgttgtacaaggattagagatcaacgcttgtggaagaaggaaggtagacatatgattgctcagaggaggaagtctaattgttgcagagctgcaaagtctcacccaactccacagggaggtctggggtgtcagaggcatcctgtgatgacccagaaaagttgaggctttgtaactgccacactagaccttgagtgaagcaactctctgcagctgagtcaaaccctgaagctgctgagaggttgaggcgctcctcggcgctggggcacaagatgcttcctcgaagaaagactggccagtagaactccatgtccatcacatagatcaaaaatggaataaaagaaatcagttccgtggttcacctatgtttaattcgatcatacacatccgtgaactattaatatattccaaggtaatagttaaaacttcatacaactgctgccttccaactctaaccatcagaaacaacaacaatcacaaaaagttcatttggccttatcagtgcaagctgcctgaatatcaacattcatgcaacacagtgttcccttagcacctgcgaggatagattctccaaatcctcagtgctaggaaaagagcttattatggaaaaaacaagtttgggtaggggctggccccgtggccgtgtggttaaattcgcacgctccgctgcaggcggcccagtgtttcgttagttcgaatcctgggcgcggacatggcactgctcatcagaccacgctgaggcggcgtcccacgtgccacaactggaagaacccacaacggagaatacacaactatgtaccgggggggctttggggagaaaaaggaaaaaataaaatctttaaaaaaaaaaaaaaaacaagtttgggtagttgagcttaacaaaggattgataaaaacccttaatttttaaaattattattataattgaacattatggttggacttggtaaattccaggcatcatgctcaacttttcaattatctcatttaatatccctggtgctatgaggcaggtggtattattatgccacttactggtgaagaaactggagtttagaaggagcaagtaatatactcatggagaaaactagtatcctgtacagcagggttaggcccccatgtttgtccaactctggaacttcatttgaatgactccgctttgttgctcatttaatttctgaacgtatacaaatttatcttccctgtgtccatcactttcagaggagatgggattgtgagcaatgatgatacattgttttcttgttcagtttcttctcttcttcctctattattctgggccaccaatctttagactcaccacatattgctcaagatacgtttcctgattggccactgaaagtgtgcatctttcctccttactaccttactaaaccctaactagtcagagagaagaaagccagacgatctaggtaggtttttatttttttaactcagatcactgaattgtgccctaagacatatatctaccaagcacagactatctttatgcatagttttctctcttttccattcttcagcttatcttttcaatgtctgtgaatataaaatattatcacaataagtttaaatggcatgcaatgcctgaaactctttaaatttttcttacttgtttggaagtcagtgtgacacttttaaaatgtgctgttgaatgaggtacagataaccaacatgctacgataatgagaacctcggtttccaacgtcttcacatattttagctgttatcattgcacttcttatccagtactttccaaacaatggattgaaatacattagtaagtcatgagaatttttctgtgaaatatagcctgggagcactaataaaacagatgattctcacctccaagataaccactatgctatgagttatttttgaaccatttaaaaagaagttaaagttaatttcaaccttgcagcaaaaatctctttcaaatggagatgctattgtttgactctcactgagtatgattacaagaaataatggttaattcttttttatgaaaaatggatttaagtccatatttgtgctttagggaaaattttgaggtaatcaaataaggtttaaaagtattgtgttgagatttttttttggaaaagaatttttactgctacattttaggctaacaaagacttcttttatacatgatgaattgtgaaaggtattgcaagtgctttctaaaataaatgcaaataaaaaaatgattggaaatctgcttcacagcagaactaaatacgtcttttgaatcactaggaacattctatgtggatagtgacaatgtagacaaatgatgcacaaatttttgttggcccctaagtgcttccccacacagatatccaatggcaacaacagcatccaattgtgaaatgcaagcatatactgttaacaagtataactaattacatgtgaaaatgagtagccaaacaatagctatttctgaatatccaacatgtataagtcactgtctaggcactgtgtgtcttagtctcctctggctgctatatcaaaataccgtagactaggggcttaaacaataggcatttatttctcacagttctggaggccaggaagtcttagatcagggtgctaatatggtcaggttctggtgagacggttcttcctgcctctagatggctgctttcctcttgtattctcacatggcagacagagagagaatgcacaagggcaagctctgtggtcccctcttataagggcactaatcccatcatgaggaccccaccctcatgacttcatctaaacctaattacttcccaaaggccccaatcctaataccatcacattgggggttagggcttcagcataggaattttggagagatgcaaacattcagtccctaacacgatgtcagtacacaaagccttctgtgggtttcagctctctctcacagtttacaaaaccctcttgataaattgatgtgtattggatgtacacttacagtgagctccagaagggcagaaagaatattattccatggtttaatcttcagtgccacgtacaatgatacagagtatgaaataggtattgtagagtgaatgaatgaatgaggaagagagatgaggcagacacatgaacgttgaaaagtaacagcaacatcaagaaatatcttatgggcaaatacataacagtttgtcatgtatgtatgtggtagaggcaacatatttaatgattctagaaggaaaatcttcatcatggaggtatttaacctgggtttgggaaggaggcgggatagtgaagagaaggaattgttaactaggaaattttataagaataaaccataagacagaaaagttcaaggtgtttgctggggacagtgaatagtctaaatttactacaaatatggtggaagaaaatgattgagaggattccattatacatcaaattttgcatacctaggctcatagactccatatcagctaatgtatctttcatctttcttctgtactcctttaaatatttttaattagttgccactgcatataccttggaaattttcacacaaaaaacattctcagcttttcatgaaaactctatggtttaaccttactctcacatccaaatggggagatcagcgggaatgaagaagcagctgctgagactgccctcctcttgtttatcatcaacctcaccgaatcttttcactcatttatgtttatctgtctcaccccttgcaatctgtgaagtatgatgaggatgtaatttgagatcagacctctgtctctacatgcacatggttgaatctccatcaaccctaactctcccagccctaagtttgcagaagtttgcagctgtcctggcaactcacaagtggcagtgtgaagtcagcaatgattgcagctaggaatgtgactctgattcaagtcaacagaagaccctctaaagtctgagagagagacagaggaggtacaggaagtgtaacaactaggagaggttagacttcactcgatgctgaaagtctaccaagaggtggggacgtgttcaatgatgaatgccttacaaaaggaaggattatatgttccctcttgtggtggccaattaacttcaagaaatttttctgcatacttcctagaaatcctaagtgctgctacctctcatcattttaaaaatatatattctcaatgatctggaagcaaaataccatctcagatttagtagggcagagatttcctttgagcattttacaatcatcatggatcctaatcccaggaaaatttacacacaattttacctataatctcagaaggttcagggagttcttggaaacacccttctttggcattttggttgttagtacaaattctatattaaaggcattttgttcacggatattatcaaaagaagatttaaaggttaagctgatgaaatttggaattctcagcaaagagtggagcaaaattctcaaacccaaactcttgaaaaatagtggaagtttaatctaaaatttaaatatcaggaattggaggagatatgatgacgatttgatatgctgggatggcaacagggaaactagaaaggagaaaattgggataggagatactgaggaaatagaatctgaccgatgcccctctatttttaaattccaatgtattgaagttttagctatatcatggaatatccaagatcttctgaaatcccggcaattctacattgccgatctgaaatgctcccgaattctttccagtgccagtcctccctgcagcataaacttattttctgtttgaaacttgcctctctcttgtgacctaaaccttactgcatgtgacaaagtagtggtggtggacatttttcatacccctatcactgatgttgaactggaagatttttggagccaaattaatctgaatcttccatgtatgttctgcggtatgctgcatactctcattttagtaaaagctcaatactttctttaataagttaaagattgtaattaaaattatgttttagagtaaaaaagatttcaaaactcaagggatgagctgctttattctttcttctattttgagaatggtcaaatattttacattatgtgtaaaataaaagagaaggaactaaataatattttgacaacatctatacctgtacttgattcgaagcaacgagttcttttttctacaatctaatttctcagatacatcatctagtgacaagtgcatggtaacatgtaattaaaaaaaataattaccatttttagttttaaaaaaagcccctgacaatcgtgaaagcaaatgaacctcaaaattcaaataactgaaagctacaacagataccacagcagaaaagaatttttcctgtttactcctgaacttgtcatttaccttgtctaccgatcaggatttaaacatattctctttaaaactacgaaatgacttgcaaagtctatcttagaaaaggacatggacgtgaaaaataagtgaaagaaaaatgacactttttgttttcggtgttcaaagaagcgaagcccaagtgctgtgccccacagaggagcaaacgtaaataaaacatgggctctgctccttgaggagcttccagtctggcagagaggagctaatgcatggaaataattgcaattcagactggagaatacagaaataccgatgtgtgctatggcagctgaagagaagagagagttgttctagaaaggaggcttaggagccattttttacataggtggcattcaagcagttcttggagaacgaatcaagtgtgagtatgtctcttccatgggatgctgaatatgaactaaattacagaaaacagaagaggccagtaaatgaaaatcactcagtgacattcttcttaattggatgcatacttctgctctccaactgctcgatttacctagtagctttgcctaattagaatgtcttgagataaatttggtatttttgaacctgagtgatcgaccaagggaaaatatctgttattgctgtcatcactcttaattcttaatcactgtctacttggctgattgaacttaatgccttaatgccatatttctgtaaaataattatagcagtatgcaactatgtatgtttcatttggtttataagacagatttctattttgagaacattacaggacatatgtgattattgcttgataggatctctctttgtttcagttccttcctatgaggactttgctttgatttcacatttccagatttgcttagatatcttggtatctaatatactagataaatgtttaccttcttcttgccttgtaaccaaagagccattgatttgggacaaggaggagaaattttctccccaattatttcacattaatttaaatcaagtttcaattatgaccttctatcgcaatttttttatatttaaagaagattttaaaacagtaccaccataatcagtccttttgtattgccagtataatttcattactgcattgaatcctcagatggcttgaaaggaaaaaaagatttaggaatatctcctaaatatttattttcagtttttgaccgcattgccaattttgtttttatttatttacttttatgcacaaatattagcatttatggttacctcaactgggtaattgtgacttgaggatgaatcatacagggagcccttaagggttttacagctaataagaacagaaatgcttttaaacacatgaatatattaaagcagctactgtcgcctgtggttgctgaatcagtgggtatatcaagatgagctatcagatgaatggagttataaagtgtgcacacaagtaaattttaactaataatagctaatatgaatggctggctttcaaaattgtttttaatacatgggaatgtattaaaaatcatccttctaggaatttcactcttattcatttgtgtttcaaattgtttccttaggtggaagataagatggggaatgactaggggtccctgagaatgtgcacttgaatgtgtcacatggtgagcacacttgtcacacagatcacagcaaataaagaataaatacacagaagtaatcaggtgtcctgagtgctatgagagatatgtgtatacagagccctcagggcagatcaaagaacacattccccataattagaccagagagaacgtaaagacttcacaaaatataaacattcatacattaacatgaaaaatttaacatctttttaaaacattgagccttaggtcctgagtgataatgcattagggctaagattgtaggtcttgggattaaacaggaagggtcagtcaccatgaaggattggtgaaattatctattaatgcataacaaacctccccaaaacttagtggcttacaagagcaattatcattaccacatattattttgtggatcaaagatttgggcagaggtgaagtgtctctggtccatgatgcctgtagttgtgggaagcaggcatcagctgaaaaaaccaaaacgtgctgaaaaaaccaaaaggtgaaagaactgggagctgtttggacatctctctctctttctccatacagcctccccaaatggttagcttgtgcttcctcacagcatggctgcctctggattgtcagaaccccccctaaatggcggtttagggctctcctagaaagaaagtagaaactgcctattctcttacagaccaggcctgcatctggcatagtgccacttctgccataattattggtcacagttatcaagcccagcccagattcaaggagagaggacatagacaccacttctcaatgaaagaagtatcaaagaatttgtagacctctttaatcaatcacaagtattttttcataacaactgtttattgagtgcccactatagactagccagtgttctacttgatcttgttaccatggcaaatagaacaaaaccaatgaccatatgaaggaattttctggtgaaggggagagaaaggagaaaaccaaataaatataaaatctattgtaaggtagtgtggcagtgatcatgttcaccaaatataaatgagctcctctacatttcccagcctcacttgcagtcagggccatctgattggttctggtcagtggactgtgagcaaaagtgatatgtgtcactttcaggccaagccagttaagagccaacacatccctcccatctattctttcccttttgtcttcagagtttgcatatgccagatcatatagcaataagatggggagggacatcgatgcacatcacactgtgatgaaagcaacaaaaaacctttgttgtggtaattatcaccacacaaagatttggggtttgtttattacaacagaataatataccattactgaacctggctaatgtacataattagtgctatgaagaaatatagctcagagtaaagggagacagaatgactgtggaggtaagagtacagttgtacacagagtggttaggacaagaattaagaagtgttgctataaaatgcactagaactttcaagaccagtctcagacttttctcacccttccatgctgcctcctgtatatactgtagagttacagatgtccctgatagttgaatatacatgatattaccatgaacttaaacaaaaagtggtctgttgagctttaaagaagaatgaagaaagatgaggttggaatttactaatggtggaagatcttgaaagtcagacagtgtaggccagatatttttaccaaatacatttggaagctgctctatgctcttggacatttgaaaattattttggcctgtggaattagagtggattgacaagacaaccaactaaaagcaaagtggccagcacaaggagacttttctcaaatactattccttagaaaaatatttctccagctctgacggtgatgatggtgtatgtttggagccagagaaaactaggctcttttgcttactatttctgtgacatgagactcatcattaactttcctgagactcaatttcctcatgtgtcaaaaaagaataatgatacttccttatttgggttattgtaagaagtattaattatatgtgtacaaaacttatcagaatgcctgtcatatagaggattttcaataaaatagtgcctatcattttattataattaattataattaattttgttaaattaatacaaggcatccctgagactacgccggtcattgtatggtgagcactggaaaagattccaaagtcccttgacatagtcctcattcctatgctcaaactcttgttaagatgataagaccaaagaaatcatgaagaggtaaattactatgcggcaagaagagtcttagaaaaagagatgccggattgtgctacgtatattttcatatgatgatagagacaatatagattttgccagtaagaagataatctactttaaaaccattagaacttctgttattaatccttaaaatatattaatacatacctatgtagatactttcacaggcaaagaaagtgacagtcctaagattgtgccttttatgttttcttctttagggctcatgcttttttagtggcagagtagactggatctcatcttaaaacaggctttagcaaaaactcataaaaaatttatgcttaataaattagccaataattctctccctcaaagatctctcctttttcaaacagaatatttcctgacttgatttaaaagtctagatcctaccgtcttctactctgtttaccactttaagttggaaactcaaaccagaaatgtcaaagtataaagaaccaatatcttcacaaaaccagaacagaaattgggtagagaaagaggatccatattttctaatatgtttcagcaaaatggtaaggaatcaagagattctgatgggtcagcccttctttctaccagtgtccagggattttttccttggctgtactgggtccaattagatcttttaaatatgcccagtcaccttctattcatgattctccttattcctcagctcaaactgaacagcagtgttttcctacgaggaataatgataattccgtgtcattacttttttcatttgtgttgcagtcaaaataggtcagtgtgaatgaatacctttctgactgccttctgcatttcaatcagcacaggtaatcccaataaatgcattaaaaatttgctgtcattgtgacagcaccatcaaacatcttgtccaccatatcaaattaaatgttttcattctcctatttaaatgcctaccacttcacagttattgaaaaaaaatccagtaatgtcttacagtacaaaacaaaggcaataactgtctgagtttatgaaattacttggataatcaatcactcatttctagagtatttcaatactcgtgtaatgatgtgtctggcacatgaaaagtgtttaataaatggcagatattatatctatttgaaaggcaaattgtatttttaattctttattcatattttctcttcagatttctctgttcatttttccatgattctatatccctaattaaaatatgcatttgagaactatgactttatgctagctgcattatctaagaataggtctttaagtgcccttaatctgaatttatatgcaatctatgctcagtgggatcaagaggaaagtagcacagagaaactgagagagttatcagcaatttttggccatgactccccctttaattgcatgaggcttgttatacttagaaatagactttggtcaataagtaaaagctaattaaaaaaaaatggaagaatggaaatattttgagcttagcagatcaaggaaattaggaatcatttgaatagggttttgccactcaaagtgtggtccatgaaccagcagcatcagcatcatctgggagctttttagaaatgcacagtcttaggccccaccccagacctactgaatcagtcggcattttatcaagacgtccaggggacttgtgtgtccattaaagcttgggaagcactgtactaagacacacaggcattaaccatgaacttcaaaagccttcagtagagagaggaagtgctatgcattgaaggacaattcaaggaggaaggcttcacacaaagttaagtaaactagaactcagctgtgtggcttgcctaaagtcagacagttttaagtggtagaagcaggatgtaaatgtaaatctgagttcacctttgacctttcctcttcatctcagtgaaaggaaagtttgtttgtttgtttgtttgtttgcttttattgaggtttctttggtttataacataatatagatttcaggtacatattataatttgacctgtgtatacactacatcatgttcaccaccaaaattctagtttccatcaccctagaaatgaccccgtttacttattttgccttccctccatacccctctggcaaccaccaatctgttctctgtatctatatatttgttgttgttgttttatcttccacatatgagtgaaatcaaacaatatttgtctttctccatctgacttatttcacttatcataatatcttcaaggtccgtccatattgtcacagacaacaacatttcatctgttttatggtcaaatagtattccattatatacatatatatatatgcaccatgtcttctttattcattcatctgttgatgagcactttagttgtttccttgtcttagctattgcgaataatgctgcaatgaacacaggggtcaacatatcttttctgattaatgttttcatatgctttggataaatacccagaaatgaaacaattggattatatggtagatctaatcttaattttttgaggaatctccatatggttttccatagtggctacaccaatttgcattcccaccacaagtgtatgagagttaccttttctccacatcctctccaacacttctttcttgtctttttaaaaatagccattctggcatgaggtagtattgtggttgtctttgcatttccctgatagttagagatgttgaatgtcttttcatgtgctttttggccatctgcatatcttctttggaaaaacgtctgttcagatctctggccattttttaatagggtggtttctttgttgttgttgagctgtatgagttctttatatattttggatattaacaccttattggatgcatgatttacaaatatattttcccaatcggtaggtcatctttttattctattgatgatttcctttgctgtgtagaagctttttagtttgatatagttccatttgtttttgctaagactgatgacaaagaatgtactgcctgtgttttcttccggcagttttatgtttcagtcttaagttcccatttaaaatcacaacaaaaagaataaaatacttagaaataaatttaaccaagaaggtgaaagacctgtacactgaaaactctaagacatttttgaaagaaatcaaagaagacacaaaaaatggaaagatattctgtgctcacgaactgaaagaattaacatacttaaaatgtccatattacctaaagcaatctacagattcaatgagatttctatggaaagaaaaagtttattggtgatttccaagagcaggattttcttctctgcttttgaaatttaaatgataaagctaatgtgtctgacttaaactttttgacatttattccttctgggtattgaagtaatgcctattcaataataacaatttaaaagacaccaaaaattatttttagaaaattatacaatctcttctattattttgtataaatacaatagatcctcactcttcaaagattccatttttgcaagtctatctactcactaaaatttattcataaccccacaatcaatactcatggcgcttttgtggccattgaggacatccacagggcagtaaaaaattagagtcacctgacgcacgcattcccaactgagattgaacaaggcgatgctctgctttcttgtttcagctctcacattgtaaacgtatcctttccaccatctattcagttccacatttttagcacttttgtgctttttgttggtgatttcactctttaagatggtccctacgcatagtactgaagtgttgtctagttttcctatgcttcagaggctgtgaggtgccttatggagaacatacatgtgtaagataagttttgttcaggtctgagttgtagtgttgctagctgtgagttcagtgttaacgaatcagcaatgcatattaagtcagataacttcaaacagaaagactcataaaacaaggccatatattgatcagttgataaaatcctgtgatcagaggcttgcaggaaactaactttgtatttttccagaagcaatggttcaacatttgttaattcagtgtttgcaacaattttatagaacgtaactacttcgaataatgagaaatcgactgtttatactttttttgttgttgggaatatgcaatgtcatattatcttgcatttatctttctgtgccattttacctggacatctactgtacttattaccatatttgtatacattatctactataaatctactattatctattatatataaatttatatatattatctactataaatttatatacaatttatataaattatctactatgaatcatatctactatatttatatacattatcttttcttgaaccattttttctatgaagagcattttcaggcattaattttccctaggaaatgacagtttagtttgttgctgtggtgtgcatatgatacttaattatgtaatacacacaattagagttcagaacagaataatgaataatcctgttgggttgctcgatcaatgatagctgtagtcatcattagaggcttcccagtggaggtggggtttaaactggaaactaatggggaagtgcaattgtcttagttaattaggaagaagtcagaaaatctatacattggaaacaggaaaagataccaatgccaaagccagcatgctctgaaattgtacagggcatatggagagggacgataagaataagatgtctgttcataatagacattagtgggactcaggtgcagacagacatggtgggcacaagattctggagagcctggaaaactccactgagagaccaacagagatgcttgtgtagaagaggaaaaataattttccctctacccttctgagttcttagctgagactcctgcagtaaaagataggttaatcagagaaaaacaaacatgtttattaacacatctacctcatatatacgtgggagatacccagggaaaaaggagtagttcaaagaggtagcttagaactctggcttgtatggcatcttcaacaaagaacaataagtttgtggaaaaatgacaggacagaggaaagtagttttaggcttccaagggcagaaataaaggctggttagtaaagtttgttttatagattcctctggtacagtcttctggctgagagggtcaaaagttgtctctaggattaactttgatccttcctggtagagaggggaggaaggatacctttgaaaatttatgtcctgcttttaagcaaacaagtggagggcagagagcttttcttgtgtctgcttcttctcaattgccttcagcgcaaaataatccttatgccaaagtggcatattttgaggtggcacattctgttttccttcacttgcttctttacagctaaaactagaacttactagtttgcaagaataaaagagggacttacccatctctataggacacactctagatctcttgttcatagaagagcgttaaataaaataaaatactattcccagagtaaaaataaaataaaaaattatccatcccttttgctggaaaatgtgtaagtcccataatgaataatgaggatgtcttatatttgtttatcccttcaaagtcccttccaaatgcgtgatataatttatcctcaccacaaacctaggaagtgcgcattgtggtgatcatcctgatgtttaaaggttaattctggtcaagtgaaagagcaggtggtcccaaatctaatccctagctgtgtaaggatgatgtagcagtgttgggaggtgtgaggagaatgctcaggacatggggaattcacagattcatcgaagtgacttagacaagaaagaaaggtataaacaaggaggcaggggaaaaattctgggggtggtgcaggatgcagactggcaagtggatttggagatatattggcagttcgtaatatttattatattataaattactattataaataagttaattattagtaatatctataatattggcagttcagggggtgggagttcttgctacagggacctgtagaggccaggctgcattcctttcagcagggaaaagggatggaattcaggcgcaacttatttaggaggtaattattggtgagaaaactgaggcaataagatcatttgctggagaattcaaatagcagtcctacaacaacaatgtgaagaaagaacattggggcgataagagtgagcagaatgagtagaacgctggcaactgccccttccaggagatgctatggattccatgagaggattattaggattgtccagctgtgggtggggccagtcataaagttttcagcagattttgaggaggtcgtgtctatcaggatccttgagcagaatttcaactccagaattataagacatataattgatctaaccccactacattcttaatccatccaatggaaaccaatggcacttttttggaagttttaataagtgatctggaaatgtagtatcatggtgagatgcagtggcttctatatctaatgaatttgaattccgactattttcagcaagtttccctttttgtgcctcagtttcctcctatgtatatgaagattaagtgagataatgcatgcaaaacaattgtcacaatcctgatacataaatgattattttgatattgttatttatctgaaaaaatctagcacagtttctggcacatattaggctttcaaaacattggttctattttcttcttctactccatattttgaaaacaagtgcaaagtaaaacatacatctaaaaagcattgcttatctcagtgtcatgatccatttatattattttattgcaatggcattagttacgtgagaatctctttccacattatgtgaatgtgaggatgagagagacggtctgttgttacagccctccataactctttcctgacctttggctctctcctggtacttagaaacaccctagtaactgcttgctcaataatctccacaaagcaacagaatagggaatacattgactatttctccagatagcttaatgataataaggtctttaaacactaagcaagagctaattaatttgcctagatagtgaattctccattgttataacacatttgtgtcatttagagctctgatttctcttcttaaggaaaaatcccctccttccctttattgaagtcataatgtttattactgtcttgttttttgcgaacaaaattatagtattacaatgtcacattctgactctccttttagaatcatagggaaacacagaacgtctttaagtctattgtcatctcacacatgtgaaaactgagacctagagcagtccaaatatatgtccaaaggagggaaggaagcgggggagaatgccgttgactgagcatctggcctgacccagcattgtgcccagtgtttgcacatgggtcatctaatctaatcctttcacctggcccccaagaagtttgtgtattttgtctctattttagggataaaggcacagcagtaagtggcagggctaacatcaaacccagttctgattcccacttcctcacttcatgctgatttcatcatggaagctgttggctgccaaatctacaatgtgtttcatttatgtaaataatatttgcctccagatatttttagcgtgctgcctgcttatgttcccatgttttctccaaagttttcctcctagttactgtgcagaccaaaaagcttaatttttgtcgtcacccaaaggtcatttctagcttctttgccgttcccctagaatgagttcctatatggtcgcaataaactgtggtcagcagcaagcagggcacaggaaatgaaattttatttatgtctttcccagatgtggggtttttgaaatatgaaatatgagaagaaggcccttcttctgtctggcttgctccataatccaaattcaattattttaatttgaagttgctttgcatggttagttttttgaaagatgaagttaaatctttaaatttgagattgcctgagaaacctctgatagaatacttcattgagcaaggaaagcagagagtgcggacataatgactgctaattctaaataacgggccagttattcacaaaatatacaggccaaaagagaagtccagtgaaactgttctctttcacagagatccaacgatgcatctagaatatgtcagatgttcatatacattacctgaaatcctcactatctcactctacaatctctatcctcactattttatacttgtagatgttcatagacattatcagaagtccttgctacaaaactggagggtagaagctaaaaggatattgggggttaaagtttgaagaacacaagctgagaaaataaagatgtatagaacattgattggtctagttttatatggtgatttttatgtttttcaaaatgcagttccatttcaagtaaaaacaaaatgcttttatgttatcacatgaagaaagttaaccaaaataataaaataagtgaaaggggaaataaatcacttttgaaaaagaactccatatgcttttggccaaagcatttgtaaagcatctctagtcatttccattgcactcctgtttctttattttcagatgcctgagatctcatccgttagtccttggtaacttgaaattttgatttagtcactgctgagctgaagtgcagattgagtggtttctttaaaaaacttgcttttcacataaatcttgcctaaagtagcattgcaacaaagaagagtatggttatattgtgaaagtactacctctattttaggtctgagacaatttaaaaaattcggtggtagaaaccaagataccttttaaaatgtgaccattttcctttctgtaagagaatcagctgcagtattttgatagtgaactttcctcctaaactcaacaaagaaacccaaatcccctaagtcctgaagccccaaatcaatactcctttttaattatctttaatcctttctgggaaataacctgttgtgacctggttccccttaaagcgttcaggagaagcggcagctagtggaaaaatgtgacagaataaacagtctgcctcgtattatgggagcaccaaatgtttcaaagagagaaagtctgaaagcgttttggcttcagtttcaatggagaaaataggccttcctttgagctacccatttctgctctgctggcagtccttcggagcactccattgatatgctgcttcgtatgttcattagtctattcatccattaaacgagcatttattgagtatctcaaattgtgctagacattaggcacgtaaagatgaataaaaaacaaaggtagtactcctaggagctcatagtctgttagtgaaagcagacacataaaccggtaagagcaatggaatgttattctccattgtatcacaccatttcctaaatagcggttataaaaacctgaaattgtcttgtgtattttgtctctcctactagaatgtaagtgttttgagggcagggatctggcatttagtgagcacctgatgagaatgagtttaataagtggaatagtgtagaacggaagactaggtccttatcacaggggactgaagtgagtaagtctatctagagttgtgagatattttctgctactctctcttgaagctcgtttctacagacatatctgtcccatgtctgccactttaagcttcactctcagtcttttacaattggcaaaactgcctcaactcatccatgcaaacatgaggatgataacctggagaaatcactttggcctcctgacgatgcagcctttcccatctgggaccactgagcccaagggtaccataaaaagaaactagggtgctgagctcaaactaaaaattcatgactttgaatctcagctctttcacttactgaagtgagcaagttatcaatctctctgacactcaggctcctcaaccataaagtggggagttaatagtactttcttcacaaagttgatgtttacaaaacgcttggtactttatgtgcattacttgaatctgcatatgcaactaatgtttagagattatcatcatcctgttttctgagagtttcattttctataaatcatccctctaactgtgtggtgggactctgactttagaacttttatccccagtattgctgtctcttgatattggtgaagggattcaaagctcttcaacagaaaatgaagtgggcagcagttgtgtgtctgacctggaagctcagagaaagtgggaggatgccagtccaagagtcatggcctcctgaaactgttggcagtgctttttgtatgagtcataaatcgccctgcacttatgtcatctctgaattccccatgcactaaaggtaataatgaaaaaaagaaaaagataatggaatctttggggtaaatttaatgacagtctaagaggaatgttttattgtggaagctgtggaaagcatttcttttgtttgctttcagggctattttataaaattaattgtggcagaaacacactggaagttattaacaagaaagaccaagctaaatgcaactataattctatccatttgaggccattaatttgaaccagtttgctataaaaaaatccaagctgaaggcttcctcgatcttcatcattttctgccaagcttcttaatttccttggtaggcagcaaagggtgactttattgatctactgtttgcaaagatttgtctctagcaaagactgtgttacagtgaatctagcaacttctaactcaagtactttattattaaaagtaagcatgacacaagtcatgcaacggtttttaagacttgttttgcttccaatgctaagagatatgcttgatgcttgaaacttgtttcagcaaacctagaatacaaacctgtgcttatcttttccttctcaaatatgtcttcccgataagaggttagcatttgcatcaggcctaatttgtagaagccatctatctctaaatacatttattcccaaagtagcatttattcattctatccccttgcctatgctgagtataaaatataagaaataaaagaataagactagggttcaagaggcacatacttctactacctaatagctctacgacattgagcaggttaattaaaatctttgatccttggtttcctccttaggaattgttgtatacattaaatatacagtacatataaaagacatatcatatcaaaagtcatagcatatgtaacacaagatatgcaaaaggcatagcatgtgtaacagagtctatgtaaaaggcacagcacagcgagtcccaaacagaccctgagccaaagattcctgggcaacattttaaggaactgctcccaggagaaaggagggaaggggtgggggaaggaagactgggaagagaaagaacccaagcaaggatgtgatttcaggcaaagtcccagcctcagcagtgatcctgtagggaggggctgtgttgtgcaaattatgcttcagtttgccaggacttaaggcaagacagcagggtcttcttactccctcactaatcaatctggctacagaatacagtggggccaaaaactctcaggcacttcccactctctgcccctgtggacacagcggttccaggaacccgagggctatcctcccaagctgagtaacagatgcaggccattacaggaagtaaaggtttaccgaagcaatgagagacactagaagctggtaacagggactcaaggggatctagacaaaccaccaatgttgttggctacaatcatacatagtaaagtctcaataaatgttagttcccttcacttccttttcctaaacagtctccacttctgtcataaatgctagccttccagctaatgaagactcaaggtcaaagactgtatactttttggccttccagtgattacacatcaccatcagtgagaatttgctgggcccacaggaatatgaatgagtcataactcgtaaaattaagatcattatgcatttctggtttgctgtaaatctcagagccatgtagggatggtaggcaaagattgttattgcgtgttggtagttgctacagagcacatggcaatttcaaacactctgctttcgttattcaaatgattaatgagatgtcatattctaatcccaaaatgtttttgataatatgttaaagttagctttgacaattacagacaaggtaaaggattcgatgtgttggaaaccagcagctctgataaatgtatcacagaggtagatgttcttcaacatattaaagatgagaactagaaccgactagcaacttaggtaaatgaagcttgatgccctcacacaaaacattgcatctgagaaactttcagcaactgtcagcctggactcatgtccatgaaaagcaaatataattgagagtcaaagataagagaagggaatttcttcggaccattatcaggttgtcctattgatcttgctggactataatgtgctatttgtggatctcatggaggtttccacctttacattctgcaaattgatggagagaaagaactgttcagtgacccctaccatagcaggcaagacagctgtgagattctccatatgtgaaccaggtctgaaagcaccatattgcttaactccaacagctgtaactcaggccaaaggaaatatttccccaagctgtgtttactgggcttagttttaggaagtgacatttacttttaattcattcagtaactcttttgtctgacatataatctctacaaacgcttaggatagcagatggagcttacactgtgccttgaaaattaatgtggccctccactggtgactgacagagagaaaccttcggggcgactaaagatacctaagactgtctctggccacccagaactccactttgagaagcatcacaggctaccttgctcaggaagaccagggaaaagacagggtggccccttgatcatagggcattagagaccttggctgaagataaagcccattctgattttactcactccacatttgcaagtggaaacaaaacagaagagcagttggaacccggagagaacattctccacacagcttgtgttattaaagtggcaaactgcatccttccaggacagctaaagcctctgggctgatttgtttttaatactgattggtaaacaaatatgactgattgtctggatgaagctttagggtgaaatgtaatctggcttggttctgttctgcgccagaactctagacttcaggaaagggactcttacaagcatgacctaggtcctagtgaaaaacatctcccttttctcacctgccaactggttaagtgtgaccaggaaaatatagatttatttttttgcttcagctctgtctacaaatatttaaagtattaattactcggaaaatcaaatggcattttatttatcatgtaattatgtgtttatgacacttgccatgcaaagcaaatttctttttaacattaattcactagcttttgtcagagaaaccatatgtagtttccttcagagtttgcacaaataagtacaaatcaatgttttccactgttactggtttccacataaacagaatgtctgcttattgctttaaagtttgccactagaaacagttttcccaaattactataaaaatccatattgacccattatttaaatcagaagatgtttctttcaaaattcttcttgttatagtaggattcaatatagaatgtccataataatgacagcaatcatttatctacttagaaaatttttattgagtacctaccatacccgatatatatttgatgctaatatctttgcgtttttctgtattctatgttaataccttcttgcttttcattctctcctctgactctgtacttatttaggagaatctcaactacaaagatggagaaaactctaaaagtcaggtgaagaaacagcataaacagtgtgaccctggggccaagaggcagtagaccactggatggtagctaaaggtctccttttgtttctaaagggctgagttctcaataaaccctgctctgcttgacttttgaagagtttgcttattaatcatggtcaaaaccttaaacctgatggctattccttgtggatggaaaacatacagggaattttctactcttttattgaaagtcaactgtaaaatttaccaagaataaacaggtttcatgcttgcagagtggagatcaggagacactgggagggaggtggaaagggaagagttctcatttagagtgtgtcaaagcctatttgaagaaaattgaaaagcttaagagttagaagaaaatgaaatccctgttgcccagtggtttgaaatttattttcctgaattttaaaagttattattagtagaactttcttcaaaggaaagcatcttaaggatccaatatgtaaaataagtaaaaacagagcttcttcagtacaaggaggagacgggagagaaggtggggtgtagagtccacaaaacttgttctggttcttagctcaattctccctaatgaatgggtaggtggggctctgttcagtctatttgctcaaaccctcacctcatacagaatttctaaataacatcactgatgatttgtgattcaacctctgcttgattgtatctaataataaggagctcattgctttaaaaggcagcctattttctctttccacagctttaagatacttatatcggtttcctgaactatcattaattacaaatcaccagtccaggaaagattttttaatacaaatgggatcagaaataatgttagactgtgattatccattttcagctcagaaaactgactacaagttcaagcatgaggcagcaatttctcctttaggatttttcaggctccctaaaacaggttcagggagttttccatggaaagtttctacaaagaaatgtattccttgaataccaccaaacatgccagattcaacctcaagaaaatgtttgttctgagtcatatgtcctttgaaaaagcttggtgttagagaggttataatgaaaatgccaaaacagacccttagcgagcaaacctgttcagaaactttgattgttcaaaaggaatgtgcatcccaaatgcaatatttatatattctcctactctccagacaacagcgccagtgagtattgactgttccctgcctttaagcccagcacaaacacaaacacaaaaccctctctgtcaaacagaagcctttcagataggctcagagaagaaagacgcagaaaagctttctgttttcttgtttctttgaggagctgtttgagaaagatctccaaagttttcaggaggccagtgagccagacaataaaagcattgtttggaattttcctgccacctctcatctgccgtgtcgccacacaagggccttagagaactattttctgtgggcaacgccgagaatgtccagtggctttgctgcctgtttttgtaaacagcttcattggaacactgccacactcgtccgtttatggattgcctttcgctgctttcaaactccaatggcagaattgagtaattgcagcagacaccttgcagaccacaatgcctaaaatattttctatttagtgcttcacagaaaaagtttgctgacctctactttagaagtggttataaagagaattcaacatcagactgagggctagagccgtagaattggccagagggactagactacaaggtttgtataactttagcttatgtaagcttgtataagctacggtttgtagaacaatagctcttcaatggatcccaaagatcatttaggccaagactcacattttccatttaaggaaattaaatccacgagcagggagcagataagtggcagagccaatgggagattgtccagtgaacaggagcttctttgcatgtttcacagcaacaagacgcaactttgtatgctttagatcaaagcccactcataaatgtgaattttagcgaatgtaactgtatagcagcattaatcttacgttcatttcattgatcagaattcacagaataaaggcaatggataggaagagaacaataaaagccacagaagaatagaaagtgatcccaggctttgccacttaatatgatttataaattattttaatctctctaaaggtcaatttatcatatgtaaatggatattataataatagaactacggtttctgaggattcagaagtaataaatgagagatgactgccacagagcgaagattcgataaatttcaataaaaaattaacaaataaatgtcttggttaaggttcctctctttgttcccctgaaatcagatactgagacagacatgtaggtgcaaggagtttgttcaggaagtgaccccaggaagccatgtgaaggagtgagaaaggggaacaaggaagaaggggaagttaataaagggtagatgagcacatggggcacaaacccatggaggtcctctcagaaaccatgtggaacctgcctcttaactgtgccgtcgggacaattcctgtctctcgtcaggagagggttgctcctattcctccctagtgggcgtttcactgggctcagggagcagtaggcaactgtaatgtgaatgggactgtctcagatgacttccagggtaggtcaaatggttagggctaagacaataacactacaataaacacacaaataatactggagtcccttttgtcctaattcagttacacaaactctaatcaacaaagatttcactctagtagcaattattaactatacactttattgagcttctaaaaaggttgtcacatcaaagtctgataatttattgttattattaatgttattctaagtaataatgataatgataaaagcaaactatcaaggtcctggaaccttccagttaggcgaagtgtttgtgaagtcaatcaacttatgtgtggtttgactaagagtaagaaacaggctgtcaatgccttgagtattagatgaagtctcccactgaagcattaaaaaaacaaaacaaaacaaaaaaattcaagttttactttctctgaagttttacttcaataatgacaattttggacaaagaagttgtataaaattttttatataataagaattcgggtaaaacatcaatgagaatattagactgaaaaatgtcatgattttaacattgcctccagtcagaggcctctatgcaattaaaggctcccacagcgatggaaaagcatgaaggccaatatggggaggggagggtcactcatgcttcctaaggatgctcaccaatcagtgtaagtagatacgcttctggcagcaacatccctgaaggagtccaggggcctctaacagtggaagcccaggcagcaaaaagtagattcaacagttccctccagtgtggttgttgacggttagtctgccttggcctttacaagacaagaaagcatttcaacccacccaattggtcacaaaaacttctccctctgttcctcagaaccctaagttgatattcaagtgcatctttagcatgtccggttttggctgggttatttaagagtctataatttagaatttacggcaaaggagagtgaattggctgtggggcatgggagaagctaaagattactgagccatgagtacatcacaaaagtgtcctacatgtttcagatattatcacatttagttctcaaaacaatcctgtggggtaggaattgatataacaactttgcactcaggaaacctagcatttaaaacaagttaagtgagagtccctcatcagccgtgtgcccgacattaggtttcttatgatctctgtatcgtcttcaggtcaacatcaagcttaccctcgtcttagagagaaggcaagctaatagaataatttaactaaaatgtgcacttctcttggaaaggctgcatttatgttttaaaagtatagataattaagtcaaatctattcttggaagaatgtttttgactcaagttggggagcatcttttagaactgcctctatctttcaggtcctaatagggcaggacaaattcggaaaggtcatcaacccctgttttagctcagcttattggtaccatctgtaaatattccctaggcatatgattacttttctggtacctacttttatttttattcatttagttactttttaacatttggcagagctggagacctctgggtctctgctgcagcctcccttctgattggtcaatactgatgccatacaagatgctgaacatgtttcatattacccattagtaaacacacaagagacatttctacaagtttgtaagaaattcaaagtaggttgagaagtgttgactattgtagcagtgtggagggagccatgacctaaaaaaaaaattttctggcttttttacctcaacccacagtagtaagtacattttataaggagaacctgtacatatctacatatgtgcctgtgtttttatataactatcagaagttttacaaaattgtttacccttaccatgttcaagacactctgatattttcttctcaaacttattttttcagctttattgaggtataattgatgagtaaaattctaagacatgtaaagtgtatatcctaatgatttgatatgcgtgtacaatatgaaaggatccctcccatctagttaattaacacatccatcacctcacatatttatctttttttttttggtgagaacatttaacttctactcttagcaaatttcaactatacgatacagtgtcatcaactatagtcaccatgttatacattagatccttagatgatattcatcttataattgaaagtttgtaccattttgccagcctctccctatttacctcactccctagcccctggcaaccacttttctactctctgtttcttcgagtttaactttttctgattttagactccacctatacatgatactgtgtagtatttgtctttctctgtgtggcctattacttcacttagcagaatgctctcaaggtccatccatgctgctgcaaatggcaggatttccttctttttcatagctgaataatactccattttaaatacatactacatcttctttatctgtttatctattgatggacacttaggttgtttccatatcttggctattgtgaataatgcttcaagaagaatgggagtgcaggtatcttttctgtatcctcttttcatttcctttggatagatacccagaagtgggattgctaaatatggtagttctatttttaactttttgaggaacctccatactgttttccataatgtctgcaccaatttacattcccaccaatagtgcacaagggttccttttcctccacagccttgccaagtcttgatatttcttgactttttgataataaccattctaacaggtgtgaggtgatatcttattgtggttttgacttgcacttccccaatgatcagtgaggttgagcaccttttcatgtacctgtcggccatttgtatctcttctttggaaaaatgtctattcaaatcttctgtccattttttattggattgtttgtctttttgccactgagttgtatgagttctttatatattttggatattaaccccttatcagatatatgatttgcaaatattttctctctttctgtggactacgttttcattttgttgatggtttcctttgctgtgcagaagctctttcatttgatgtagtcccactcattcattgttgcttttgttgcctttgcttttggtgtcaaatcaaaaacatcattgacaaggagcttattccttatcttgtcttctaggagttttatggtttcaggtcttaaatttaagtctttaatccattgtgaactgatttttatgtatggtgtaagactgggggccaatttcatgtaactgttcagttttttctagcaccatttgttgaagggaatatcctttacccattgtatgttcttgcctcttttgtcataaattaattgaccatatacgcatgagtttattattcggttctctattcggttccattggtctatgtgtctttttttataacaataccacactgttttgattactatagctttgtgatatggtttggaatcaggaagcgtgatgcctacagctttgttctccgttttcaagattactttcactattcagggacatttgtggttccatacaaactttaggattttttttctatttctttgaaaaatgccattggaatttgatatggattccatttaatttgtagattgctttggatagtatggacattttaacaatatgaattctttcaatttgtgagtgtggaatagccttccatttatttgtgtcttcttcaatttcttttaccaatgtcttaaagttcagtatatagatctttcaccttcttgattaaatttattcttagattttttattcttttggatgcatttgtaaatagaaaaagagaaattaaggattaatttctctttctgatagtttgttgttagtgtatataaatgcaacatatttttgtatattgactttgtatcctccaactttactgaattcgtttattagttctaacagtttttcagtggaatctttagagttttctatatataccatagtttccccttatctacagtttcactttccacagtttcaattacctgtggtcaactgaggtccaaaaatattaaatggaaaattccagaaataaacaattcacaagttttaaatttcatgctgttctgagtagcatgatgaaatctcacatcctgtggctctgtcccacccagcatgtgaatcatccctttgtccagcatattcatgctgtagaaatgctacttgcccattagttgcttagtagctgtccatgttatcagtatattgttacagaatactgttataattgttctattttattattatttgttgttaatctcttactgtgccttgtttataaattaaactttatcatagatatatatgtgtaggaagaaacatggtgtatatatagtttagtactaactgctgtttcagacatccactgggagtcttggaacatatcctctgaagatggggggactactgcttacagatcttactcaacttatgatggggttatgacttgataaacccatcacaagttgaaaatagccagatttggtggtctagtggttaagatttggcactctcaccacctcagcctgggctcatttcctgatcagggaaccacacaactcatctgtcagttgtcacactgtggtgtctgtgtgttgctgtctttctaaaagctatgccaccaatatttcaagtactaccagggtcactgatgtggacagttttcagtgaagcttccagactaagacagactaggaagaaggacctggccactcgcttccaaaacaactgaccttgaagtcctatgaatagtattgtctgacatggcactggaaggtgagaggatgatgcaaaaagactgggcagggttccactctgctgtatacagggtcactagaagttggaatcgactcaattgcactaacaacaacaacaaagctgaaaatattgtaagtcaaaaaggcatttaatacacccaacctaatgaacatcatagcttagcctagcctaccttaaacatgctcagaacacttacattggcctacactcaggtaaaatcacttaatacaaagcctgctttgtaataaagtattgaatatctctgtaattcattaaatactgtactaaaagtgaaaaacagaatggttatataggtacagaatggttgtaagtgtatcagttgtttactcctgtgcctgcatggctgactgggagctgtggcttgctgccactgcctagcataatggtagaggattgtactgcatattgctagcctggaaaaaaatcaaaattcaaaacttgaagtattgtttgcactgaatgtatatctcttttgcactattgtaaagtcaaaaattgtaaattgaaccatagtaagtgagaaaccatctgtaatatcatgtcatctacaaatagaggcatttttacttattcctttctgatttggatgttttttatttctttttctttcctaattgctctggctagggcttccagtactatgttgaataaaagtggcaggagtaggcattcttgtcttgctcttaatcttaaatgaaaagctttcagcttttcaccatcgagtatgatgttagcagtgggcatgtcgtatatggcctttactatgttgggatatgttccctctatacccagtttgttgaaagctttcatcatgaatgaatgttaaattttgtcagatgctttttatgcttctgttgagatgatcatgtatgatttttattcttcattttattaatgtggtgtgtcatattgattgatttgcagatgttgacccatccttgcatcctagggttaaatcccatttgatcatggtgtatgatctttttaatgtattgttgatttggttttccaatatttgttgaggatttttcatctatgttcagggacatttgcctataattttcttttcttgtcatgtccttgtctggttttgttatcagggtaatgctgtccttgtaaaatgagtttgaaaatgttcctttcttttctattttttccaaagagtttgagaagaattggtataatctttccttaaatgtttgatagaatttaccagtgaagccatctggttccggaccttctttgttgggaggtttttgattgctgattcagtctcattactagtaatggtctgtttagattttctatttcttcattattcaggttatatgcttctaggaattttccatttcttctaggttgtctaatttgttggcatacaatttttcatagtctcataatcctttgtatttgtgtggtatcatttgtaatgtctcttctttcattcataattttatttatttgagtcctctctcatttttccttggtaaggttcttgctaatcttctagctaaaggcttctctattttatttatcttttcaaaaaaccagctcttgtggctggccccgtggcccagtggttaagtttgcctgctccgctgcaggtggcccagtgtttcgttggtttgaatcctgggtgcggatatggcactgctcatcaaaccatgctgaggcagcgtcccacatgccacaactagaaggacccacgacaaagaatacacaactatgtacccaggggctttggggagaaagaggaaaaaaaaaatcttaaacaaaaacagctcttagttttactgatcttttatattgtctttttagtctctaattcatttattctgctctgatctttgttctttccttccttctactaattttgggcttagtttgttcttctttttctagttatttgagttgtaaagttgggtttgtagaactggttttgctacatcccataagttttagtatattgtatttctttcctgtttgtctgaaggtatttttttaatttctcttttgatctcttgtttgattcattggttgttcagtagcatgttgtttaatctctacacatttgtgatttttcagtttttcttcttgtaattgacttctagtttcataccattgtggtcagaaaatatgcttgaaattatttcaattttcttaaatttatattacctacttttattgattgtgcttttatgtctggatgcaccaattctttagttactatccttgaatagttataagactagtaatttaaggatcaattttgttgcaaagagcgtttaaagatttttttgtttgaaatatacacaaaggccctcaaaatttgtctgaagcctgttttagaagagatttataaaatgtccagattcttctgccagaaaattagacatagatcatctagaaagagaaaatatttaaaactctttcatcatggatgctaagggtaaaaaacataccatgtatatgactttggttttatatttctctgggaactttgcctcattagagaaagtcacgaaggttttttcacatttggttttcaagttatcttttactctgcaaatcattttagagtggtgttgattagaacaagcattctcaaacttctagactcagcatcccttcaggatggtaatgctccctataaccatcatcttctctagttcatggaaaggaaaaaactgaaaggaatttatattgctcttaagctgtgaaaaaaggaacataattcaatggttaactcatgcccatacaaaagcataggcatggttactgtggaaatatttttactaaatagagcttgaaggtcactagataacttagaatacttaggcccttccagacttaattggttgggatgtttttatgtggtaaatcatctctgtccccagctccaacgtggtgttattttattgtatcccatcattctatttctacatttattacattgttttacattacttagtttacatatcagttttacctactgaattgtgagctcctgtgttttattgatttttcctttcaccagcatcaatcagttacataacacgtatgagaaagtactaaatgttttgtcaaatgaatttatgcaagaaagggatagatggagggaggaagagatccctccagccatctcactaatccttttctggaaatcaaatttctttccacttctctattacactatacctcatgtaggaacatattcattcaaggaggctcttacagctgtagtggagtaaagggagcatataaagttcagagggataaccggaggtcggattatgaaagaccttgaggacaattttaaggactttggctgagtgagtaaaattgagggctagtgtaggcttttgaacagagaagtggcatgttctgacttccattttaaaaggcttactctgctgctttgaaaatagaatataacagggcaaggatagaagcaaatagatgcattagaaagccattgcaggaatttagactagagaaggtggaatctctgatcggggtggcagcagtagaggtggtgggaaatggtgggactctggatgtgttctgaaggtagagacatcagatatcagacatgttctgatgaaggtttccagtattattgacttgaatgactaaaaagatagtgtcttcatcaactgaaatgagaaagctaaggatggagctggttaagaggcagtcaggaatcacaggttgattgtgagatatctattagacattcaagtggagatatcaagtaggcaattacttatgagtctggagtttaagaggttcaagctagaaatataaattgtgggtcaccaacatatgcaagttatttaaagccatgaggttggataagaacaaaaaggagtaagtatacataagtaagaggactgagctctgagacattccaacaaaattagaatagtggtcctttccttcttgagttaaagttttctccatttttgttctccaaaggggaggctggatttattaaaaattttcacgtgtaatgaaatcagcgatggaaaaagtcttattcagcattgggatgatttgctgccaaattcaagaagattatagttcaaaatattgcacctaaaataaaattatcactatcagagaagaatttataagtgatcctatctgaaagagaagcacaactgtcaaaaccaactttgaataaatgtgactgcatcaaatacatgcattataaaagtctacctataacccgatgctcttccaataaaaacaggcctggaaattatcttggtgactcttactatccacaagccagtgactcctgtattaaattcctattgttgtcataacaaattaccaccaatttactgatttaaaatgatacaacataaatttcttattttatagttctgaacatcagaaatccaagaagtgggtttcaatggactaaaatcaaggtgttggcagggctgcattcctttctggagactctgagagaaaacctgcctccttgcctttgcctgcttctagagactgcccataatccttgggtcatcttcctcttctatctttaaagccagcaaccacatcacccaacctctacttctaccatcacttgtccttctctgactctcactttcctgtctcactctttctcttataagaacccttgtgattaattgggctcacctagataatccaaaataatgtcctcatcttgacatccttgttttagtttgcttgggctaccagaacaaaataccacagactgagtgacttaaacaacagatattcattttcttatggtcctggaggttagaagtccaagatcaaggtgttggcaggtttggattctcctgacatctctctcctttgtcttcccgtgatgttctcctctagttcaatttctatgtcactgaggaagaatacatccacagagccatctttggattcatgagagtgtgtccattagaacacatttgctaatctggattaaaacattttttttttttggaatatgtaggtctgaaattactttgatttctttttttaatatatgcatagggatcaaaagctaagaatttagaatagggacatttttgtccaatttactctacctccccatcctcactttctggcagcctgcctcatgaaccagctgggcccacattttctacttttccccaaacccagtattacttctgtatctcccactctgtggatcctgcatccttctcctctctatttccattgtctcattctggttctgacttcatcatgtctggtatctgttctagcaaaagcttccccatgggttaaaagaacaaagtgctgccttctctctgtgttctcatatggccacatgacctatactccatgctcatgcattcttagtgtcccttcttcttataaagacagcagtcctacaagattagggcttcacccttatgatttcatttaaccttaattacttgttttaagacccagtctccatatgggttttaagacccacgttgaggttagggcttcaacatatgaattttacaggggacacaatttagttcataacaatttttattttaattatatgtgccgtttcctttgtcacgtaaagtaacatttttagaggttttagggatcaggacatggacattggagtgggggtcattattccgtctaccataactcccaagtttatatcttcaacttctgtctctcttctaagtaccagatcaatgtatttaagtgcctatttatttttgccacttcagatatctaaaagaaacctccactacatatatctaatactaaattaatgagtttgatcctaaatctggtctttctccattgtgagaccaccatctacttactatttcattaaataaatccaacttgaatttagttgcatttgccagaaacccaggtgtcatctttaagacccaccttcccctcacctccatattaattcaatgtcaaaatcctattgatttaatccagggagtggcaaacgttttcttaatgcaccagatattaagtgttttagactttgatggccacacagtctctgtcccaactactcaactctgctgttgtagccacagacaatacataataaataggtgtggttgcattctaataaaattttatttgtgatgacaggcagccaacccacaggccatactttgctgacccctgatttaaccttgaaaggtttgaaaataggttttcttcagtccagtccatctccattgccaacaccttcatctaattgatcatcatctctatctcaaactgttgaaagaactcttagagagttggtctatccatatccacttttgaaattctccaatattctcctctcaggacagttagaataatcttttaaaaatacagatctgattacatcacaccctggtttatatccttcagtaaagacataatcctcaatatgacccataaattttgcatcatctgactcttgcctatgtctcttgcctctgccaaactggttgtgcttggtgtcccagacacactaatgtaaaactggccatgttccctctcacctcagggcagttgcacctggtcttttatttgcttaagctgtctttcctcaggtttgacctaagtgactctatgagtcattgtctttgcaggaaaaagaaggtataaccacaagaggattctgaaaaaaaattaatgaaggggttgctatggacccaacaggaatgttgaggaatccagggactaacaatggcaagagctgggatgatggaggaggaaccacgtagtaagagctgtggttgtagaggataatgatgtacatagccattctgagagctataaatctgaaattggaaggaaatagagaaggaaatattcagacccccccccccccatgtctgttcaagggttggtgcatcccattgcttgaatccaactggaaaccagaaggtaagggatcctgacagaagcagcctatagaagtcaagtcccctctttgcatgttcttataacaactttttcctttataacactcttcatgattataatttgtttttattttcaagactattagactatttctttctttctcttggaatctgcatcacacaatgtcaaagactgcgccagttttccttacaattatatcatcaaatcctatcctgggcctggcatattgaaggtcctcaataaatagttattaaatagtcaaaggaaagaaaaagtcaatcaagaagagaatttgggggggggaggttattctctctcccagttattttcactctatgcaccatgctggtgcccacctggcttctggcagtagtcttatctctgtctctctttctaagtcccttgctaaacacttggacttaagaatggaatctgactccaacactgtgacaattggaccatccttggacaagatttccacctcctctggccactcagttctcattcatctcctaagctctgaccacctaagcaggtaccagtgatggaagtgtcatttctcttctccctcccctacctgaatggagatcacctaaatgggatcagacaaaccctatatgacaaatggtaaattatgacaattggtagcaatttaattgatagtgattatataaccttaacattctagattctcatacttttctttccttaggaaattcttcataatcttacggaaggagaaagctcttttgacctttccagtagatctctcagtttctacttggtcccatctcatatcttcatcctgttttagggtagatcaacgagttttgcatatttaaacaaataaatacttcacatgaaaaggagttatcacttttctttttcctcttaaaatttgtgaaaatttttgaatcaaaaattcctgtgaagtgttgggcactttaagaagataacatacttacttgatccaaaaatatattttctaagatttgagatagaatttttttatcaggataaagtcaataacaatagaacctcattgtacaaaacaggaagtacagctctgaattaagcatcttgacattcactaaatgccagcaggtaaggttgaaattttgaagaaaccattaatgaaaactctctgctcagcctaagtatagccaattagtacagataatagtagatttactgcttggtgttttctaaagtgacaactttagaaaaggtattaacacacggagatttctttggaaatatatgcagatgaatatgtaagctttaaaaatcctacagtaaactctattatctggcagtcttaatcaggtattttagttgttggagaataactataaatactattcaaggtttgccaattttctaaatgtaaaatgacttaacaaaacgtggtactatatgtaattcagtatttcactgatggttcacaaggcacctcagaatcaagcctgatccccaattgagccttatcaacattaaccaccttgaaccagacaatctgttaaagagagggctctgttgataacagtgatggctaataccaattggtatttaaagactcattgcactacctgatgatattgaaagagaaaaagcattaattttcaaaatttaatatggtttttaaagtttttaaatttaaattaatttttttaaaatgtaggtatgattttatcagcaaaagaaattaaattttatcagtaaaataaatgatttaaaagtgaacaacaggaaccgtgatataaaatcatgcttacttgccagtaagtgaggtaagtcatgagataactccatgtttaactaaggaactgtcagactgcgttccaaagaggctgcaccatgttaccttccaccagcagtgtatgaaggctccaatttctctacatcctcaccagcacttgctcttatctgtctttttaatttagccatactggtgggtgtgaagcagtatcttattgtgattttgatattcatttccctaattgcttaaagatgttgagcatctttacatgtgcttattggtcatttgtatatcttctttgaagaaatgtctattcagaccctttccttgtttttaaattgggttatttatcttctgattattaaggtgtaggaatttcttacctgttttagacacaagtcccttatcagacatatgatttacaattactttcttccatattatggattgtcttttcactttctactagtgaattttgcatttttgttgtgctttcaactcaagcatttctatttggttctttttaaaaataatttctaaatcttcattgatattctttatttgatgagacattgtcatcatagtttatttctataaacgcgatttcctttgggtctttaaatgtttttctaatggctggtagttaatgtgttaatcatttttgtggtattttttcccctgaggcattcattttttcttcatatttaatatgaataaaattttgtgatttttttttcaagggaacaaaaaaacctctagaagtcatagatgataactttaataagaattagaggaacactattgaattttgtttattatattattgtatatgtgctatttttgacgtgcgtcaaaaaatccaattttcttactcaaatgatctaatttcaggtttaagtggattttcatttcatactagaagatgctaacgtcagtgcaaagcaatcactttatgtattgtcaagatcatcaaaattatcttgaaaatcttttaagcattaacttcctactccaccctccctccaatattatttggctttatgggtctgtgccaacagattttttttaatagcatcaaatgaagtggttggatttgcttaggagctatgtagtacaaaaattgggtttgagtttatttttgagatgattgtacaggttgaatgttcataggctaggtgaacatgtgatgtgattttaccaagtatgagattatgctccactctccaatgatcagaggtgtcgtgaggaaacgtaaaatgacacagaaaatggggacatcaattaaaattattttaagcagcttaaatatatttaaaaggcttaggatgtctttcctgtggtgattccccattcttgacagattcaaataacaagtctttaggaagacaatgtgataacttccttccagctcctctttgactttgctactcaatcatacaagtcattttattcattttaattgagtgtattcattcaaacttttcataatcatctagagaggtgagtcatgatgatagtcttcagttaccttctagtcttggtaatgaaaaatgatgcaatccaagtttgaaaagcgctttattttcttggataccagattactgaagtaatgtttttaaaaaggcaagctcgtatgtctctatttgttatgttgttaattaatatttattagtggcgtgaggagcaggcgtagataatgctaggaggaactaagtgatattgaatggatgtgagtgttcctagaggacagacaggcggaggcactttcactcctgcagttaatttagagaatacgatagacgagatgttctttctgagagtagtcaaggaagtagaaagcacctctgagcctgtgggctgaacttcaacttttgctaactcaaaaaactttaagggataggtattgtacatgcatgatgcaaccacgtactcgggatgtgagtggacctgtggaaacctgcagaggcatgttctacttagaggcatgtctattccaaattttaaaggactctaaggaaacaacacacatctactggccaagtttgcctctttgctaccagtttctgaactctgatcaagattaaagaaatataccaggctcaggatcatagaaccatcatatcataaacttgaagccacacaatctgacgttttaaacttcttctctttccttttaaagtttatcacataattccacttcatataactgtgggacatacctctggtgacatagctcacacataaattaatgtcaaataaattaatagataatgatgagaaatttcggggaggttgtgttgagaaaaaactataatgatcgttttatacataccagtgacattatatatgctaatgtatttatttgaacaaaactgtatggtagatattatcatctcctattttacagactgaggctcagagaagtcaagtgattggctcaaagttatgggctagtgttatgggtcaaattatgttccctcaaaatccgtctgttgaagtcttaactctcagtatctcagaatgtgactgtatttgaagacacggcatttaaagaggtgataaattgaaatgagccctaatccactgtgacttgtatccttgtgagaagaggagattaggacaaagacgcacataaaggggagatgacgtgaagcctcagggagcagatggccatctacaagccaaggagagaggactcagacgaagccaccctgccaatagcatgatctgggacttctagactccaaagctgtgagaaaataaatttctgtttaaaccacctactttgtgatactttgttatggcagccctagcaaactaatatagttagcaattcataaattcaatgcaatattgtcagaattcagaattaactattcccccaaactctcataaacaaattcagcttgaaatacctcatgtattcaagtagtttttgttaatatcctgtgttagtctaggtttcccaagaaatagatctcaaggcagtcttaaatattcaagaatcttattaaaagaaatgcctgtgtgagaaaataaggacaggaaggctgggagagccatcaaactatggtgcaagtctatccccaatgaaagagatggggaaggaaagttggatgaagccatctagactgctgtgcagtgtaagcaatgttcagtaaccctgtgggaagtcctgaaaccaaagttagctgtgagaggagtctcatgtctcctggggataagcctgtcttagcatcccctacaagctcaatcattggttgaaagggtcttgggagaattggctttggcacaaacatggaaaagagtgtaacaactatgacccttagtcaactacctccttgcatttggtctataagatgcattctcctgaacactgttaaacaaaaatttattcaatgacacttgttaaagcacagtaaggcagactttattctagggggactgttgcaatatgtttagagaccactgcaatgggattttgcagtggggagaaagatcgggcccaactcagaatatagcatgggcaagtgggaatttacaaccaaggagaagggtggtgagcagtggatggaaaattaaaaacaggaaacatcagagggaagaggagattttggccaaaccaacctaacaggattcttgctgaagacaggccagggtgatcagacatcacggaggggatggtggaggatgagaaactcaattagatacagagagtgatcagatatggaaggtgggggattccggctaagcaaacttagcagaattcctgctaaaattggacaatgctgagatgagcatagaagtccaaacattgaggtctagttgaaaatttcagggaagactgaattgaatttggtcagaaggagaatctttaggggccggcccagttgtgtagtggttaagttcgcgtgctctgcttcagtggcctggggttcaagggttcagatcctgggcacggacctacacagtactcatcaagccgctctgtggcagcatcccacctacaaaatagaggaagattggcagagatgttagcctggcaccaatcttcctcgagcaaaaagagggagattggcaacagatgttagctcaaggtctatcttcctcaccaaaagaaaaaaaaaaagagagagagagagaagaatctttgtcaacacgtcacttccaaatttcctaaccttatgaagtggctttgattttataagggcagatcatatgtaccatctctgaagcaacaggtatatttagtcatcagatacttgctgagtgtataatgagggcttgacaaccatcaagaagcaaagaacatagaatgatgacaacaaagaaaaaagagtcaaggctttcagggagtctacaaacatgttgaggaatcggagttgtgtatgcagaaccctggagaacaattcaagaaaacagtcaatcatttcagattgatttcccaaagcaagatttataaccacatagtacaagaagatgactttaggtggtacatggtggagtttttattttaatagttaattatgtattttaatatactagaaaaaacaaaaagaacagcgcattaaactgtgatgtaatggtcaatattgcttaggctaaagatgaacttaagtagatgttaggacaaccagtccatgggtaggagaaatactgtgaagatttataaatctcactgaagtttggaaaacattgacatgataattgtatgattcagatataacccttctatgagtcattaaatgataaagtcaatagcaaaaagaacaaaaagtggctgctattgaatttcaaatggaaattagacttttgaaggcaacattttggttatgtcaaattagcatttattttcataagaagtttaaactaaatatgctttaagattgcatccaatcttgatattttgtgttttttaaaaatagctgctttctcctgagcttcttccctcagtgtttattgagagcctactgcatgccaagtgttttgctcaaagaatacaggatgtaaaggatgcaaaatactcagttctctccctcaagaagttctctatcttctgagatagtcaaagccagatcattacaatacagtgcatttaggataaagcatatttgcgaagcgttatgggtcactgaagctgagcccctcatctagtttgtgagggagcagggaaggagttctggagaggtggtcaggggtcaggttaatatggacagcatgtgtggtgtggatgaagactgtatgggtgatgatagcactgctagagtccaaggtgtaaagcagcaagctgcatgtagttaaatttatttttatccggtaaaatatataaaatacatataagtacataaaatttaccattttcaccattttttaagtgcaaaattcagtggcatttagtacattcacaatgttgtacaactatttggttgttaaaccaaatgttccggagctggatagtagtcacaaccatgaccactgtccagctccagaacattgtttcatctcaaactgaaactctatactcattaaacaatgacttcctgttagcccctccccatagtcactgttaaccactattctactctccatctctatgactttacttattctacatacctcaaataaatggaatcatacgatatttgtccttttgtgtttgacttatttcacttagtgtaatgttttcaaggttcagccatgttgtaacatgtatcagaatttcgttgctttttaaatctggagagtattctattttatgtatgttatactacattttctttatgcattcatccatcaacggacatttgcattgtttccacattttggctattgtaaataacactgctgtgagcactagtctgcaaatttctgttccagtccctgccttgaattcttttgggtatatagctacaaatagaattgctggatcatatggtaattgtatgtttaactttttgaggaaccatcatattattttccacagcagctgcaccattttagattcctaccagcaaagcatgagtgttccaatttctccacatcttcaccaacacttgctattttcctttttttttcttttttggtgagaaaggttggctctgaggtcacatctgttgccaattttcctcttttcacttgaggaagattgtccctgagctgacatctgtaccagtcttcctctattttgtatgtggaacaccgccacagcatggcttgatgagcaatgtgtaggtccatgcccagaatccatacccacaaacttggggtcactgaagcaaagcacacaaacctagccattacacactgaatcagcccctttttcattattttttatttttaataagagccatcctaatggctatggagtaatatctcattgtggttttgatttgcatttccctaatgaatggcatttgatttcgaatgttattctttatgtgacatggagatattgattggttatgatcactgctttcctatgtttcagtgataggagtatattttcattttaaaagatcaccctggctgcaatatggacgatggatttaagaagaagactggggcaggaagagcaggaggaaggccaattcaatactccaggagagagaaatagaagggatgagactcattcaataattgtacatggctctctcacaaggaatgcagtgtccccacaggaggaggtttagaatgtgaagataagtcctaattatgttgcatttgagatatctgtgagatggtcggacccagaaggtagaagcagtctggatcagagataaagatgcagttgacatccaagtagagttattattggaggaagaagcatggatgagatcacacagggagaatgagggctaaggatgaattcttgggaacggccacttttttatcagttgcaaacatgagaaggactccatgaagattcagagaagtcaagggacattgaggagagcactggaccatggaagttgacaaagaagagtgtttgagggagttaattttactgtaccaaatatggcagggatttctagaaatattagaactaatcctaagagaaaatctaactataccctaaagtagagcctaggactctgtccattaactcacatcctgtatttttgtttaagttctaaacccaaattccaatgtcagatgcagaacagacactgatatccactatcacagcttattcaatgttcctttttccctaacacagatcctacctagagggaccacatctgaattaaagtgaagagagtgcccccatgaggcaaaggttgaaagaactgaaatgccctcctgtttcaagtgttgctgtgtcctccatcatgattcattctgagcccaaaagcttggtgatgttttcagggcttcttttctgccattgagcaggaactgaaaagagctggtcaatcctagcaggctagctgctatctgggggtcagcggggggaatttagcccaggagagccttcatgagcatcaagctgcaccttctgtgttcagtatgtggtcagcatactcagtagccctttatctggcttctggttcccactctccttccctgaaagtcctgacctcctcaccaattcctgtaatctttttcccagcgctagatttgatgccagtgcctgtcacgtcatctcagactggcctcctcccagccctgctgatgttgaaatatgatgcatgtcaggattccactgctacatccatgctacctcctctgtttagaccccttgcctgttgactctagctcagaattagccagtttacctccttacctagaattcactaaaagactactacaagtccaatttttacccatctcacttcattctcagcttcccagtgagaaggttcctctgtgctcattgccctgggacatgatattctaccccaaaattactgtaattcccaagattaaaatgagtcacaccttcagattaaagcatggtgttccaagctaaacgtgttacctggaagagctagcacattgtcattgcctgttaacatcatggtatgtatcaaattggtcattatcctatcaccaagtaagatcttgagggatacaggacagatgtattttcaaagactgatccattttcaatttggaagatagacataatttagtcctacttcctatgtggtacataaactcctacttttgtcaccctaatctggttctccaggccctggttgaacattttctatgacacggaatgctaaacacacaaagcatgtatgtatttggagaatctaatggttagattctttaccctgagctccaaaccactgtttatccctggaagagcttagactaaattatatccaagaaatatttattgaacacctaatatatgccaagcacaatgctaggtactgggcacaccaagaacagcaaggcttgatttctgccctctacaagctcatgtcctattgaaatgttggaattacgtgtagaagtgatatatgacaccctcttttagttgttccatagttacttcctttacaaattagcttagcacattcttatcatggttctgtttgatttccttctctctttctttctgaaagactccaaacatcaaaactattttgagaccagtggggcttctttcatgataaactagttgggagataatttatcaagcttgtctcaattatgccacagaagctaagtgatgaaattagattaggaaaagaataaacaagagcattcagtacatccaaaaaggcatctgttgaatctgaggatagtgtgaaagtaaggaactttttcaaaggcattttagaattaagattctgatgggatcggttatgcttctttaaggccaaagttgggggtcatccatacagccaatatcaaagaggctgaatttgttttcacttggagacaaagtgaaaaagagccttctattataaatgtgctcttctagttggaaactaaaaaatagaagcactcagtaggcacatatgtgcccagagatttggttactgtgaacattttctataaatctaagttataaataatcatttagagtgcagaagcaggtgcaatgtaagcatgcaaagctgttgtgatgcgggtgctatttttccaaagttggcttcaaataatgccatacacaagaagatggaaaagtactgaaagaactaatagcattgtccaagtatctgaaactcacaaaagattttcagaacaatgacaacttgagaatggttacccttatgactcagtgatcagaagacatttcagaaacaagaattgtatgaaatcttcagttagccagtcgcacagagtgcaagcagatctgcaacgcaaccgagaagtgaatatggtagaaacagcacttctcaagataatgagggagaatgaggctgggttagtgagcatttaaggcaaagatgccaattatttcccgtatttttttttaaagtgactgcattttactcctcctttcttgctgcccctaattattattaaaattattattcattcttcgtccaattattcccttaccacgtacatgttgctgctatgttatctggaaacatttagtagaataagtgaagtatatgtgcagattatgtttcctaaatggtaagtcttggaataggataagctaacccaaagtaattttgaaactgtttcatttcctcaatcctttatctggttgcatcaaattacctaatatcaattgaaattgatcttatttcaaataaaaatctaattgtacaaagacaacttgaaaaaataaaactaaaaaaaaatcatagctcaagctttcaaatatatcttgtcctataaatttttcaccttaatctacacacttgatataccacactcttattgctaaaaatcagttggaaaatatctatattgtaattggtctcaaaacaagttttgccaggctggtggtgaaggcattcctattagtctacggtctttcccagttttgttcccaaagcagaattccctggtgtgaccacttaacttgattgcaaaacttgtctcaaatacaacgttgctgtttccaaaaatcacatccattgtgtaaaggtcagagattttcctggcagaagactttcaaacgaacatgccacagactctgccagcatttctcatagggaattcaaaaaggtagccaagcctcagtagcactgttaaactaagtatgtggcaccatatttcatttagatgcataaattctgtttttaattaatttttttcatgctttattgaggtgtaattggtatacaaaaaattgcacataattaatgtatacaatttgtgagtttggttgtttgaatacacttgtgttcccatcatcataatcaaggtaataaacatatctatcaccttcaaaagttccctggtgtccttcgctgtttttttaaattttaaaatcaaatacatgactgtgtagtcacatattgtattctttcagtgaacaggaggtaaaaaaaaaaaaagcgcagacatattcctataagaaggaatcaaagaaaatgcctggagctttttcatggctgttggtagtgatgtctgtgtctcctacggcttctagtatctccaggactctttgtacttaataagtgacagaaacacgtctaagaagcagtgactataattacctctctcggacaaagtctccagttgttacctgcttgtaacttcctagggagccagggatgagccctgaaatgatgtctgcgttaggacagcaaagatcattgtcactcttgaaaagcaacctcagtatttactagtcttggaaaggcagtgagatgaagtgcagtggtttccaaacaggtcatgagtcagaattcctgtggaggtttttaaaaacatgtaaagaggtggccttatccccagtctggccgaatcattataatgggggctgggcctagatgttggtgttatttaaaggtccccataagagcaaccaacacatctaatgcccagaccagtgtttgcggccactaggcctcctgggaaaggagatgtaggtgagggcccctgtgtctcttgttctctgactgtatgaccctgcacaaattgctaacttctcaaaacctcaaagtccacatttctaaaatgggagtctatgtggtaccctaaaatgtcattagcatgtaataaatcacacctgagatgtgtctggtgcatggtagactctcaaaagaattcctgtttcctcctgagtcaataggtattatgaacagaatgtttgtgaccccttaaatctcatgtattgaagccccaaccccacaatgtgatggtatttggagatggggtctttggagctaataaggattaggttaggccatgaggatagggcccttatgatggaattggtggttttataagaagatgaagagagagagagagagtgtgtgtgtgtgtgtgtgtgcacgcgtacacacacacaccaaggaaaggctgtgtgagaacatagtgagaagtcagccatctgcaaggcaggaagaaagctctcatcaggaaccaattagccagcatctcgatcttggacttgccagccaacttcaagaaataaacctctgttgtttaagccacccagtctatgggactttgttgtggaagtctgaatagactaagatattggaaaataagacctaaaattgcatagagatagtcaggacagttcagtgagatggggtagcgtatagaattttttcctgcaaataaaccctgtgtgagcatcttttcagagcacctgtctggacaagctcagagtgggcagtctacctcagcagcagacaggaacctgagccaatgttctccagctgcctttggcaggacatgcactaagatgccctagaaacttggaaatataggaaaaaatgatgtcttctgagaatgaagataaattaaaatgcattacaatagatacgtgggagaataccaagagatggtaattaaatgcactgtagaggagtttaggaacaagcaaatattccataaaggaaatctggagtaatctgtatgagagaggctagaagtgtttgtagttctctacatggaaacttaattaacatactttccctgtctagatttaaattggttgaggaggaaggccatgtcaaccattaacacacaaaaggaaagaaagtctccaggcccagaagaaattggagaattcggtttcaggatgctcttcattcacagtggaggctctgaacccagagtttgttgaaactagccttcatggccatccatccaaacctatcccgaaagttcattcactcatttattcattcattcattgagcaatatttattgaatatcaacatgtgccattcactgagccatcgttgtatatacatgtcatcaagcccactgcttatgttcatgatgtgtgtggcagggtttgtgtatttgccttttctaagaaattccacacctttaatcggatcttcaaatggttaagaatcacagatcaatgggcaaattagctcactctctttgattactatgatccaggaaacatctgctcctttactatttgtaaaagtctttcctagtgcactagttagtctgcaaaatgtataaggcagacagcagaaatctggagatcccaatctttggaggaaggtgaaaggaatctataaacctgagaaaaaaagtgtttggcattaaattatttaaatgtttctcctaaagaaacacccattgattggcaccttgtggtttcctgaaaggaaaatgcacatagttacaagatgaagttgcctttattctgacccataagtattactaatttcataaataagaggtttatttttcacaaagacattttataacatacagtagctctctggcaagcaggataggcagcctaatttcagccagaaacactggtaacacttaatggtatggacacccaaaattgtttatcacactctccaaatgaagaaccaactggaaaacagaaagacagtgttaaagaatggaatagggggagagtgtggtagcaaacttgggaagcgaatgcaattctaaggtggtttctttaacgaagtgtaacttgcataattggatgtgatcattttttttagaagctagagcaatcaacagtttttctctattcccatcctgcctgcaggcctggattctgagccgcattgtttggtgaaaacattttggcagctaccgtatattgtaggcttaaacaggtttttaatcatctcagacaggggggacattttatttcaaaccaggagcaggctatgaaatgggagactcattaggaacaaaaacagatgagctccaattaaactaactgttctctggcaaacccctggggtcttggagggtaactttgtttaactaaggtttacagaacaaacaagcgtgcttcaggtgtcattatggaaaagcaagtcaagacatgactcaagattgctttctcagtcagattactgctcatttactgtcgcttgggactgttcacaatcagggcctccctttggcaccattgttttcttctgagataattactgaggagtgttggggcacggttaagttcagatctctccattagacttcagagcctggttgcataatgattacgtttctttcacttgctttactttcaaaatgattttttctaaaccccagaacatagatgctgtcgttcccaggatcagtgctggttgttcccttctccttttgtggataacttcctcctggacaagttctgcaacatatgagatgccccaggccttcaggagaactaagtccccctactgatccttctggaaagagtgacaacatctcctgcccattagattcgcctggggggcttagaaaactaccaatgtctaaactccattcccagacgttctgcttttaattattcagggatttttttcatttatatttattataaattcctctagtgtttataatgggcagccagggctgagaaccactgacttaaacagtgtaccttccacatcattcatcaaaaaagcttggaaagccagacagacactgccaggaaattcacttggagcactttcagcgactttgtccttaagaacagggagaagagcttgttggaaggcctggacaagccagctcatttccaggtgctgcatttgttgaactatcccctgccatccccattctgaaccctaagttagctcagcatcacagagtacccaaatatgccgtgctccttcatacctccatgccatttcacaggctgtcctttcctagaatggcgcttacccacatactccatgcccaagtcccaggcaaaatcccacttctccttcaagaccagctcaattcccacctccttccctacacgctcattctacccacagcacatttccatttttccatgcttctgtagaattttaaacacatctccaacatagctcttgatatataacaccattgttcatcacttgacacatctgtttccccagtacattatgggcccctgaagggagacacttaggggttacaacagggagtgtctgatttgaaaggtggtcaagagcaagcttcttgctgtcttggggcctttgcagctgcccttccttcatgcagtgagtgttgttgccatacaagggtaggaagaaattcaaatattacttcctggaaaaaaacctgcaagaagcaactcccccatctgtctctatcaccttgccctattttattttctttgtggcgtatatggagcatctaaattttctctgtttgcttgtttactcttgtgtctatctccctctggaacgcaagcttcttgagggcagacgcccctgtatcctgtctgctcttatacactaggacgtagaatagtgtctgcatcaacatagtagatggtaaataaatatttgttcttgaccagctttcaaatcagagagacctgggtttaaagcctggatctgtgaattccagtttgtgtccctgggcaagatatgtaacctctctatgcctcagtctccttcattctaaggctctttattgctatcctattaatataatcctttttaaagggaaaaaataaacactatattcaatgagcagatcagttagaagttgcatgcaaattccagaaaaattaaaatgtcaggggaaatagcatattttagaatgacgccaattcacaataattggacaatacttccctagcagagtggctgccgtgattaaaaaggaaggtatctgatgcacctggcaaggacctgttctctctctctctcactgtgtccaaagtcactctatattcaaaccatgcaagaatgctggattccagctcgctcaaatttaatcactccatcttcaaataaagttgtgccaaaccatattcatagtgaaattcatcaaatttgtctctctgttcagcataatttgggaaccgatttggtctgagctcccaggcaagtcgtatattgaaaaaaagttatatatatatttatacacacacatgcatatatgcgcacacactatgttttaaggaagtttatttaataaataaatcttaaatataaattcccttaaccatctgtatattaattagtcagaactgagacaattaaagccttctatgattaggtcgttcgatatttattcagaaaataattgaataaattggaaaaagtggaaagggcccaaggattactggttagttttatctgtcatgcctgtattgccaaagagtatattcccctggctattagagaacttgccaattcagaggaagcatgtggctagctttgcctctgtatgagagtgaggcactccatgtgaccagacaggtgtcagaagaaactcgttaagtctttccagacacctgatctgaactaacattgtaatgtagaaaccctggtgttttacaaggaacttccagctgtaatacagaattaactcccataaaaggagcatgtttaatgtgaaaaggtctgtacttttgttcttcacataagtcaacaagatttctctaagccagagctacataagaccttgttgatccctctgctttcagagatgtcccattaatcgtccaatctctctctactttaacttctttttctcttctggctcttcaatacgtttacatcttacgcttaaatcacttcattcgcacgttctccccctcctttaacattttttaaaacggtaaaacagaaacactcctgtttgcaattctatatctgacatctccatacaattgagtttccatccatactgctcttcttcaatgacatccatattgcaagaatgaaatcggtttttacttcactgggtctccatgaatgtaaaattagttatcgctcactaagtacgaaaacttcttttgttatttgctttttgacacaggacttttcctcttcctttccaacttctcttttctctccccataacacttgttgaagattattctcttctgtagtgttctccaggactctgaccttgaccttgccaccttcttgcctcgggcactctcctacattagtgtttttggccacaggccaaaagtgttgactgtctctcctgtatatttctacagtgctgatccaatactgtagttacctcagtaccaggtttactatttccacatggccaaatgtattcctccttgttctctctgtctcatcactatccatcaggtacccaagctagaaatctgggagttccagtatgccctttccttttttgtttaatcaatcactaagtcccagtcattttacttctcaaaaaatcttttgaatcttccctctctactccattgctagtagaattgaacttgcacgagctttatcttcttttgcctggaatattatcagtatagctggtctcactatcttcttggattctcctacctcccccctttccctactctttaactagatgtttcatagtccataccatagccaaagggaaataagatgcaaatctgaccatgtcattctcctgcataatttatttactagctctttatgaatttcaaatgccttagaatggcatatgcagtcctgtgtgaactggctactccatatctctccagtttcatttccaactgtttcctgatttgtactttttaatttttagtactacgggattttccaatagttcctcaaacaaatcacttggttccagaatccaatacctttgctttagctatagcctctgcctagaattatcaccctaacttcattagcttgaataatcctttcttatctcttaagactctgtcacaccacatcttccttataaacctcccttgaatgtgggtgtatggatatgtggctgctcctaaaaaaagaatattcagtttgatttaataaaaccatatcagcaatagcaccaactcagtgggcagtaagatacgttctggtcactgcactgccactaaccagctctgtgaccttggacaaatcccttgattgctctggttctaaatttccttttgcctatattgacctttttaaggtagaagctttccaaagttctctctggcttccattttctgcatcttttcaccaggcacaaaacatttcagagttgtcaataaatcagaagtttagtacaactacaaagcttgtttattgatcattcttgggtaaagtggcttttatatgaagtcaatatatgtgttcaatgtattcaaagtaattactttatgtgcttaaaggaaacaaatggtctggtctgcctaccccaccttgcagactgcaggggtcttttgtttttctttccattaatcaaaggcaccaattctgggaagataaacttcggcagaggggaaggagcacgagtttttgaggtcagatctggattcaaatcatggcacttgtcatttattttcttcatgacattaaggaagttacagaacctctctagttttcctcagtactaaaattgaaataattactactagagggcatcaatatgtcaaactcctgacaaagcacttgacacacaggaggtgcccagatgttatcacgtcatcatcatcatcatcattatcattattatcaatacactagctagaagagagaagatcagtcagctaatgatagccaaatctttcattttgtggggtacatttataccagcagcaaccacaagatgctctgatattaggttaagaagaaactcaagtatatgaattcaactcctttacagataagggacaggaaagccagagaggctaaatgatttatcccaaaataattgaaccccattcttctaggtcaagtttaagctctttcctttagtttatgcttctcaaactttagcttacatcacaatcacccagagagcttgtaaaacacatgttgctgctccccacccgggagattctgatttagtagttctggagtagttttgataatttgcatttttaacaagctcccaggttttgctgatgctgcactttgagtagcagtagcactgctatcgacaactctgttctgaattagctgggaggagttcttggctttcttaaacacctcactctcaggaagcgacgaagagggaaagatgaggccatatgtcttgattattccctaccaggttctgtatgggatacagcactgccaatgaacggattatgagctattctcccatccttgccttttcctactatactcttagacagtgagcattaggtttcagaaaaacatgttccccagctttattttataaaaattacagtttgttttggctgacgtgtttatagtcattttcggagtttgcagatgcacattgaaatctgcagtgtctgagatgagaaattggctctggggctcatcatttacttctgtgcagtagaaaagctcgcagtttttgtactttggtggtgggagaaaatacaacaggaccaaatgctatctggaaatatgatacacggaacgtgttaaggaattgaacgttcccacctatttatttcctctgagaagagggaaacagatgatatccccaaagttcatttgttaggttggcagttaagcactcccagctcatatttccatagaaacaatcatgctctttccagctggctgcattacgcgttacaaagggttttaatgaacttacctagaaatcaaattactatttgtaaaacaatttctaaggaaaaatgtcttcgactttgaggcaagaaggaaagagtggttcaaagaataaacaagcaatattttttggagaaagaggtattgtaacagatcaggtttggtagtgtcaacaaattccatgcaaaaatgagagtacttgaaacctctctcagttcccttgtctgctcagagcagacaatatattcctcacagagtccttgtgaaagttaaacaggataatatatatgaagactctgctatatgttgaacaaagtaggcactcaataaattcctgttgtcgtttcttaaggagcatatattctctgacttctatttcttcacttccatcccttttctcccccgcagaaccatggtcactgaagagggaggaaacaggaggaaggatggcacttcaaatcccaccttcctcaattatgcagagcaagtccactcatccagtttaaatccaacattttatacccgaatctatctcaacactcaacaaaacattaagagctcttcatttcaggacccgcctgcctcaaaaggcagattagtgacttttttttgtcacttaaacatttttgaactttagttacttgttgaattttcgatttcatcataagcaatttatgaaacaatttcatagtgttttctcctagaggatactcaaaattgttttctttatccatttacatttgttacatttaaatactaaatattgaagggtgacgtattacatctaatggtattaataaaggggaaaaccacgtgtacttgtgaatgaatgtttgttgctttgagtaggtatttcagcaatgttcatcaactcattatccagcacctgctacatttcaagtttgttctcagtgctgaggattgtgaacgaagccaacaaaaatgctatctaatggcatttagagtcaaatggcgcaaacaagacaaagaaataaaatatacagtctacgtaatagtggtaattgctaagaagaataaaagagtttggaggaggtgagggagaattgggaatgaaagaatgtaattttggataaggcagatttggattagcccttctggactaagtaaggtggtaatggaatagtgacctgcaattgtcaatgggatgagtcatgtagaaatctgggtaaaaattggtccaggtaggggccagcctgatggcacagtggttaagttcacacactccactttggcagcccagggttctctggtttggatcccagacacggacttacacattgctcgtcaagccatgctgtggtggcatcccacataaaaaaatagaggaagattggcacagatgttagctcaaagacaatctttctcagaaaagaaaaaactggtccaggtagaccaaccccaaatgcaaagggcctgatgtaggaacatgcctgggatgataaaggcacatggaggagaccagtgtgcctggggtaagggagaaataatgagaggtgaaatcagaaacttaccataaaagacacgtaccccacttgaaattagtttttacttttataaagatgacagctattagaagattttgagcagaggaatcacataattcaatctatgttttaaaaggtttactctggctgctttttctacagaatggaatatgggaaggcaagaacaaaagctgagagaagatttagaagacaaaagtcaggaaggagaggatggtggcttggatcagaagtgtagcagtgtggtgctaagaactgatcagtttggatagtctttaaggaagagccaaatggatttgcttgtggtttgtgtggtaattggagaaccccttacttggcattactggaatagatggcatatacctacctgaagaagccaacattctgagacaggtggaggtggggagaatccactcagcaaaagcatatgattttaaatggccatgaacaaatattcccatgccacttattctcaattttctttttctcctttccttgataatgattgagagttccaaagtgggcaatgaacgctctgggaagattaagttgcccataatagcaaattcaaagttttgacgcacgtgccttgtttcagtctcatctttgactagtgtattgtgcagtcactaaacttaatgcttccttttccaaagctacatgcatcaatttgttagtcctttccaatataattaattttgcaaataatcttgactttcaaccagagaaggtaaatgttttttctggaaactcaaacatcattcaggacactctctctttctagctgtcatggttaatcagtccccagtatctggagattccatcacctctttgtctctcatatccattcatgtctctcaggctagttgtccacaatcctaatacttgaacttctgaaacagcctcttaattagtctctttgcctgtagttcagccacactcacctcccaatcagttctctacaaagcaacgacagtgatctttctaaagaacaaattcaatgctatcctgcctttgcttacaatatttcattggttccccagcactctcaagataaaagagcaaactactttagcatgcttaaagagcctttgtgatctggctcctgctgaccttagcagcctcatctcttgaaatacaacttattcccatccaactcatccactctgtgttactcccgcccaaacaaactcactcagggcactgagctcttgcccacgtctaagacatttcacctactgttccttcaaccagtaacacattttcctcctctctttctgaccctccttatctttgagatcttagctcagatgatatctcttttcccagctagcctgtcctgtttcaagtatagatcaagtgtctgtctaatgagctcccatgatgaaccaccattgctctcactacagtatttaataactgtctacttacttttctgcattctccattggactgtaggctccaagagggcaagagtagctcatttgtacatatggtatccccatcacctgtgtcaatgttgggtacatatagaatggttagtaataattgtagaattatcttggattgaatggaaaagcataagaatcacagtcaaaaatccctttaaacattatctttctcctttcactgctgcacaccagtcctctacatatgtacacactcctgcaaacaccctccccatacacacacatatacacacacttgcactttgaccggcctcaaactaatttgtgctaggaccaccctttaactcgaagaatgagcaggtttccatatttaatgcaatggtctagcctctccttgaaactctcttttctcttgactcccatgaaaatattactttctaaggcctccttagatctctctcaccactcttgttctggcatacttggttcctcttcctcatagaacatcggtttcttactcttgtctgtctctctctatacatcttgcttccctgaatatctcattcactcttgtctcttcaactatcacctctatatggatgagccccagatttttatctctagctctggcttctctcccaaggtatagcttcacattttaagttgtcaactcagaagctctacttggattccctgctggttactcaaatgcaactctactaaaatttgttattttcacctccctgcatattcctgtttccaatttccccagggatgacttgaggtggttgtctggaccctcatgagtttcctttctcctgaaaggaccgaacaccacaggagtgggtctgcagtgctcttcttcactaggtgaacttcctcctggttataactgattgatccaggtttatttgcctgacccaaggtgggccaagcaggatctccctttttgaagtttgaaatttggccatgaatagattccatggttaaaagtgcctggagaagagacatgttaagaatagccttctaagtagaggtccacaaactactactgcaggccacccatagctgccttctttctgtcacttcctaactcttgatttttcagttctttctttcaagttcatgagttttgctagcatcctttcaatgcattttcaccatcttttttattttttcattagtcaaagcctgcaaaatgttgacaaataaatgtttcatatttcacaaccagttcagatcacctttgatgactcctgtcctcggtctctgcttcatactgctctgccaggttcagctctccttttttgctagtgtcggtgccaatccctttctgcccactcataggacctctgacttagatggttgcagtagcctattctgtggtcttcctgtctccagttttcttatcttttctttcatcgctgtggttccttttggaattcttattgctagatgaagtaaacaggacactgctatgatcatgccactccactgcccagaaatgttcattagattctcatcattcaactctcttatagatacttgtcactcttcatagtcaggcttctcccacatttccagtttgataaattctatcttgaacctgctgtactataaagtgaagttagttgctaatctctaattatgaccattgctgaggcagttgatgtggtttaaaattcctgcatgaagcaagaactctgttttatgtcattcattcactcaacaaatagttatgacaagcctataaccaagaagagtgctaaacattcttctaggtgctgaagataatgtgacaaataggttagtaaaggaccttgacaggagcattctatatgggtggaaaaagataggaaatgaatgggctaacaaacatgttaaaaagaataagatctaggagggtccagcaccatggcctagtggttaagtttgatgggcgccactttggcagcctgggtttggttcttgggtgtggacctacaccactcgtcagcagccatgctgtggtggtgacccacatacaaaatagaggaagattaacacagttgttagctcagggcgaatcttcctcaagcaaaaagaagaagattggcaacagatgttagctcagggcaaatcttcctcagggaaaaaaaaaaaaaacaataagttcagggagaatggtgagtgctaaggagaaaataaaagagcaaattgatagagagtgatgggcagtggtaacaggagacagaatatgcctaatagggtggtcagagaaggcctgtctgagaagacagcatttgaaccaagaactgagtgatgagaaagagggagaaataaggagacagccttgagggaaagaacattccacacagaaggatcatgaagcacaaagacctcaggcaagaataatcttggtttattcaaaaacttgaaagcccatgtaggaagaggtctgtgattgtgggaggaggggctggaggctgaagcgagcctcacttgagatcaaaaagaggccaggacatggtgaagagtttgaatcttatcccgaatgtaacagttaatgattggaaggccacaagcagggaagttatatggaaaatgcagtctttcatctggctgctgtgtaaacagactgtggaggtatgagagtgaaaacaggaacatcagatgggagcttgttgcatggtggcttgagtccagggctatattagtagacttcataagaattagtcagatagaggttacattttggaggtggaaccaacaggatttgttgatgggtttatattgaggaatcttacatattttagcacatagtagacactcaacaaatgtccttattgactccttgaaggaatgattgaactactatgaatggtcaaactcagattccataaagcactccctaatggacctccacactcttatttccttctcttctccctcctctgaactcctgctgcactttaaacacactttctcatggccactagtctttttccttggatttggtgatttacgtgcattccttacttccccttctagactgtaagcttcttcaagatatttaacccccacagtcccttgcatattttgcatggcacataatcagtgactattttttgaagaatgaatgaataaagtgaagtgagaagttacacaaagtttaaaattcttaaagaaacgatcactgagcgaaggtatctgaactccaaggagttttccacatagattaaacaattatgcagctcagtttgtttacactctgtcttgcttggaagcctaggactaactgagtgactaagagtggctatgtttcagagaaccaagcactgaaaggcaatgtgaggctggctggtgtgaatgaggacagggtttcaaggtttgcttggtcacataccaggaaaagtggttaagagtcttaaccattttgaattgcagttttgtcatttatcaaatgggcataataatagaaatacctcagagatggtttgtgaagaatcactaataattactcttataaagagagtacttgctgtgtgctcatcaaagcccagaatgctttaactgtactgcgtactaacccatttattgctcctgacaacaatgtatgcacttttattatcaccaatataaagcacttactgttgtcacccaaggggtggggaggagtggtctgcctgctgcaagacatgccaatagttgagaggcaagttggtaggagagaatgtgttttattacagcttgctagcaagggggaagttggctgactaaagtctgaaagaaccatcttacagaacaaagactacaggccagaatataaggggctggtctctgggtgggagaggcatctggtcttagttcctgataattttttgttttactggatatgcatcagagactggagcaacactctgtaccctgatctttcagttgtcattgatgatgactctcagcatagactctctgcctcagggtcatcacattcctaaggaacttaaaagaataaagttatcaacttatagcagctgggaggggccataaaattgacagagcatgtctgagttagttgatcagaggtcactcagagtttcaatatgttttcttttctacaatatggcttccctcgtgtcaacctttgttaaatcggcattattaccacagtacccaacacagaaaaagcattctgtaagtattaaagaagcaaaaaccccaaaactggtatggagccagaatacctggttttaaaacccagttttgctgctgtttttgaccttcaataaggcaaactctcattaccctaattttctcatttttaaaatggacaaatgtaaggaataagtgagacaaaatctgtgaaagtgcaaatacacataaaattacaccaaaatcctggataaacgtcggtgtttggaaagtgttagagctgatttttagcccaagtgtataagacaccagcccatttaaatgcagtcttctagggagaaagcatcatacgatcttcaaaggagaaagtctctcatttactaagttttgttaccgcagtaaacactatttctgaaagtcgtggtctgtgacttgctcatgtccagagaattgacagctttaagtaaaaattaaaacctcagtagctacagatcttggtttgtttccggtcttatccatcctaggatgtccaggccagttaattagagcattctgtgtgagtacttttcaccacttacgaagcaccttctcctccattatcttttgtgatcctccgggaaattctgtaaaagaggaacattatcccagttctgtactccagggttctagctcctttggctccaagtttagtctagggctcacaggaaacacctgctctgcatctaattgcttctgaccactaaaatgaaagaagaatgtccctcagtctgatcattagctcatatcttctaaattgtttggtgttcctttttaatattttgaaatgtagtttcttcagagtcctttcttagtgaaaattggaagttcagagataggactactaattaaagctgccctttctttctgaaagacaagcttctttttctgtagattaaacacatacacacacagactcatgcccacatacctcaagcggattgctcttgatgaaagatagaatttgtaggtttcaatttagggttggctttccttttcttacttaaaggagcatttcctgttaaaagtaacttgtatattataactatgtggtaggcagaataatggccccccaaagatatccacattttaatccccagaactcatggatatgctaaattacatggaaaaggtaattacagttgcagatggaatgaaggttgctagtcagctaaccttaaaataagaagattaccctggattatccaggcaggcatagtggaatcataaggataagtgaaagagagaggcagaagagtcaggttcagaatgatgttgcctgggaaagactcagctggccatttctgacattggacatcaaggtgaccactagtcaaggaatgcaggcaggccctagaacctggaaaaggcgaggaagaagattctttcccagagcatggtgaaggaacacagccttgccaacaccttgattttagcctaatgggacccatttcagacttctgacctccagagctgtaagataataaatttgtattgttttaagctaccaattttatggtaatttgttacagcagcaataggaaactaatactaactgatttcagcagtatcatagtatgagtgtaatgatagaaaacaggcaatcttcagcaaagacaagccacaacacaaattgactataccttctgggaaccatggaattctcagaagagaaacggttccctttccagctctccaggctcctgtttttggagctgagatagtaagaaaatttttcctttgcctcttttttttttttccttcaaataaagcttagtcccttttaccaaagagattcactcaggtgcagcacaaaatgtgtcagtgcagctgagaacacgtgagtcagtctgtgggaatcttgtgcctaggaaatgagagaaccaagctaatgaagtgataaatctatgacaagtggggccccgtcccaagtgagtgagaaggcatcacggggcctaggaacattgaaagcaggacccgaggcccagctatggctaatgcaatatgcatagagatgctattcatcatacttttaaaaccacctgctctgtttccaaggtcatttgaagccattgctgagaaggcagagtagaagagatcctccgcatgtctagttataggaccctagagatggaccagggaggtgggtctaactcagcgagaggtagccccttgctcattcctttcctatagccttttttactcctattttaggttatctcccttgaagtctctgagaatcttacaagcagaaaacaggccacattcagctttatattcttttttttttttttttctgctgtggaagattttccctgagctaatatctgttgaaaatcttcctcttttttcatatgtgagctggcaccagcatggccactggcatgtggtgtaggtctgtgcccggtaactgaacccaggccacagaagttgagcatgccaaacttaaccactaggccaccagggctggccgccactttgtgttcttgagcccgtcacagtggcctgcatagaagactgcttctctctctcatttccccttccttttcttcctctcttctctcctcccttcagcttttctccttcctccccttctctcctgagccccttctcttatctcatttcttttttctttgctcttttgatcttgcttccaggaaagaacttgaaactaaacatttacatttcactatgaggttatggccacaccacaggctacctttctggagaccatttgcattttaaattttgtttctctttgtttaatgggtctacaataaaagcaaaacaaaacaaaaacagccatctttacacatatctccccagggatgtaggaacactggctcttgagtgagaattcctaaagttaattcccaattccctgacttctgacacgtaattgtcagggaggaaaaacttttcatctaccctcttaggttcaataactgcagtctgcaaattagactaacaaacaacagaataacagaagaaaaagtgtacagtttttattaatatttatatgcatggaagttcacagaaaagaagtgaaattcaaagaagaagttagacttgggggcttatataccattttaacaaaggaaagagagttttgtcttgaagggatgataaattgtgggtaagtgactaggaaatacatgcgggaaactgatagaagatgaggcttattttagttacagctgtttgtacagactcatctccgtgccgactctctgtctctgatgataagagctgctctctgactcctggcagaggatggtgggggatggagggcagcttcacaaaggaaaatttatggccttcttttaggtagataagaggagggcagagaactcttcttgcatttactgattctcagttgccttcagttcactataatccttaagccaaagtggcatattttggagtggcatattctgatcccttcacaatctgggcaagttacttaacttttgcatttcagtgtcctcatctgtaaaatggggttaatgatatttcctatcttatcagaatgttgtgatgattcactgagatagtttatgtaatgcacacagtacactgtctatcacacagtaggggctcaaaatattgtaatcctacttatactataataaagaaaaggataatcattattatcatccttgataatgatttctctcaagccagcccatcgtagtgatatgtggtagacagttttgagagagagagcccatgaaaaggattgcgacatgacagccaaaattacatgtcatatcaaattggtgaacccaggaacccactcagtttaggccagaaaagccaggaaaaggaaattaaagcaagcaaaaacagtcataaattatagggaaagattctattcttatgaatgttttctagttgcatttccaaataatctgctattttgtttatatgaagattacatcctgcgcatgctttggtcatcagatacttgagaactctttcaagataacattagtgcaatgttgctgaatgttccctaaagtggaaggtatttccccctcatcactaccaccttataaatttaacagagcactcaaaccagaacactggatgcttaattgtttaatggacaaccatatacatattttaaggaattccattccagacacatttattaacctttcagaataagccctgtagctgagtgagatagcttatgtcctgtcatgtttaagtggaaagcttgtctggagaacatatagagatctttccaagtaattgagaaatccaaagacagagggatgtgagatactttctggtggaggtaagggtggagggtagaatagaaggcaccagaggggaaatagctttcatcattttggtgagaaaaatcttaaaattagaagagacactaatggtcacacaccaactgtgtcctcgttacttgctctgtcaagtcccaacgttagaaggcctcttccagcaacattccagccccgtttttctctcctgcctcaatccagctatgtcaccatcatgaatgctgccctagcacgtgcccctttccattcccaggaaagccattcctcctatcctcgcttatttttaaaaactagcttaggcttctctcttcgatggaaacgtctagatgatgccaaccacagtgacgtcttgcttctctgaactcttattaactaggagtagaaaatgtttcttttagaatttagtttctttttaacttctcagtgcatcattctgatttcccctgtagttaacaattcaggaattatgacaaaccagaggattcaagccaactttgtccacttcccaagtcctttggccttgaacaagtcaattcttctctctccatctctcttttaaacctctgtaaaataaaatgattggattatttgatctctaaaagtttatacaaatttaaaccaataattttaattttaatttaagttaactagttcctatatgcattctatctagatcctatatgttattctatctatatttttggagagacaataggtagggtggtaaatctatctaattttaacatttttctcaactttgttacatttatttttatatttatataatgtcaatagtatgaagaaacatcacctggtgaaatttcaaactgaagatacaacaaagaggaggaaatgatcagtttcaggtttcaggcaaatcatcccatttgaggttatttaaagaatcacaatagatcagtgcaagaaaattgaatgtctctactcactgaccctttctctttctcggactagtcaatcaacttggcatgcctccttggagtgtgtttttactttcctaagagtttctggcaatatttccccttcttagtcccttaccagagacccagttaaagaaccatttgacatggtgcagagaggcccaaaatcgagtgataaatcgcgaagtgcctagaatctggcacccaggatacccaagttcaaatctcaactctgccgagtactctctacaagacctcgggcaaatcgcttaaccttttaaagcctgaactttctcctagaaaccagagtaataatatgcatctcagggaattatgaaagaattcaattagctagtacgtgtgaagattttagagtagtgcctgacacttatacagtctccataaatgttagcagatattatttttggagtaagttagatataaatcctgattgtatgctttattgaatgtgactttgtgaaaataatctcagcgacccttggtttttatttttctttgaaatagggacaataacagctaactaattgatttgggataagattaaatgaaattttacatatgaagtacatagtatggtacctggcttagaataagtgggcaggaaatgtgagtttattcctttcctttggtatggaagacagacctttgctacaacgggaaaaaaagggagggcctaggaatgaggaaagaaaaccagggcatattttaatataacaaactgggttgggactggcaaattgctgcaacaaaatgatagagccataatctggagttgttttttaagataatatgtatccaaatattccttctcagatggccctagaaaaacaatcttccccaagtgtgccctaattccccagacttctcagatgaggcaggaaactcgttgacgacactattacattattgctattactattaccttaccaaatcttactgtggggggtgcatgtgagagagcccatggcatcctcaagagctggaagatcctgtagctggagccaacagaaagagctcagaacaccaagtggtaaagggagctaatgtagatagaggcggggtggaccaccaagactctcagatgatggactctacactgggaatgctgttgtcctgaagtgaagtcctgcctggaatcaacaaaatcatatccgtgggtctttatgtgagtttctaagatggtgaggatttctttcttggaaaatgacatgtgacaatttaaaaatactttgcctagctctataaatcaaaaaatcaattgacaaatatttgctgaaatctgctgaagtgtataaacagagaataatgaaattgagagccagaaaaagcaatgtttaaattctagatcaatagctttctagctttgtgacattggttaagtcactaacctctctgtaccttagttttttcaactgtaatatgatattgtataggattaaaagagatggttacagttaacttcgcttaattaatttctgtaacttttttttaaaactttggacatcctatagccaaatgttggcaggaatttcagagaatggttacttaaaacatttcttttctcatcaactactgagaactacttcccttcactggcttgctgacacaactgaacacaacatgttcagatgaataggtggttgggcagattgatataaaaatatctcccataggggctggccccgtggccgagtggttaagttcgcgcgctccgctgcaggcatcccagtgtttcgttggttcgaatcctgggcgcggacatggcactgctcatcagaccacgctgaggcagtgtcccacatgccacaactagaaggacccacaatgagaaatatacaactatgtactggggggctttggggagaaaaaggaaaaaataaaatcttttaaaaaaaaaaatatctcccataaacattatcatccaaaatgcaaagcatcactgtaaggtccagcttggtgacctaagtatattcctgatgcccagaggagaaaaaaaagtcctgcgggctggagtgatcaggcagtctatctgggaaaaagactggaactagacccaggagcagggaggagtggcaggacgaggggagagccaagtcactttatccatctaggcccagcagagcttctaagagtgggcacttctgccataatcccacagctaccatgtgctgagcaggcaccgggctcagctctccacaatctcagttaactctcacgccaaccatgagaaggaggcagtcacattctcatcttgaacttagaaaactgagagtcagagatggcgtgctttccccaaggtcacacagcaagcaagtgaaagaaccaggatttaacccaggtctatctctccaaagcctgtgtatgacacatgatttctaataatgatgaaagctgtcactattgatggttacctgctctgtaaagcctccttcctgtcactgccacccatctttcctcaggtggagttgacttttccttcttgtgctcccactacaccccatagagacatctgttcaagtgctggtgtatttattggtcacattagactttattaaacttattaaacccaaagaatagagctgaatattacttgccattttatcattcaactacctgtcacagctcatagtagcaactttacaaatgttaatgaataaccaaacgaatgaatgaatgaatgaatattgcctaccaagcactgtgcccaccccagttttggtcggtaaggtgatctctttatgcttcaattttcttgcctataaaatgtagatgaccataatgcctaccgcatagagctgtggggatgagttagtgttgatacatcactgtaatattgataaacagagtaaatgctcagtaaatgctgttattacaaccacatttaattctcacaattctctttaaatgggggacgttaaagaaagtattataatctcaacttcacacaataggaactgttttcagagaggttaagtgtcttgcaaaaaaatcacacagtaaggaaagagcagaaccaggaaatgccctcccaggtttaagatactagtcataaacccttgtttttcatagggagttcccagagataaaacctctttcatatacagggtcccagttgattctcttcaccagtactataggaccaaacttagcagagtggaggtaactgtcagagtgattaagccagtgtggtcctggcataacccagagtccatgaccattcccaccaagctgcctaggctgccagaatagaacaccccacaggatccttccggacagcatgaagaatgtgtccctgatgataagattcacctaacttcttgtgtaagaacacaaactccagaatcttctgaatcagactcttcacaagagagtgtttttaacaagcacctggggtgatttttatcatcagggaggtttgtgaaactttgctctgagacaggctgaagtgagagtttgaaggatgatagaggtactcaccctccagggggcagttactgaacatcagtgttcttacaaggttctgctctgccctaccctgcatccatccatatttgtaaatataaagactaaatcaatctccctgataatgctgtcaatgtgttagcaggaaccagacagccccagtggagtggcaggtgggagctcgcttggatgctcccgcttgacaaagccatgaatcatagatcttttgctcctgcacttttctccctagaaaagctgcccatgggcttccacaggggctttctgaaagaggctataagcactagccaccaacacggattttttccctagaatcccgagagggggctgagctgtctcgcagcgcaagctctaggaggagagagcagctgctatggcaaaaaggggacattcgcaagctccccaggcagcaaactagcgcgcagacagccctgcccagcctggtttcccgttgtcagcgggtggagcagcgcggtgctctctagggcaagtttcctgggagtgtcccttctctccacggacacagcaaagtctccagttttccaacagatgtttcccccgcagctctgaagtctaagtactcgctggctgcagcgcagagtcccgaagccagtgcactgtcgttgggggacaccaccagacaaatggcagcatcagcatgagaggctggacttcagcccaggtcggtcctcactccggggggccgctgctttgcccggtgcatctgcgaggagctgctcacttttccccctcgcgagtctttgttccaagccagatattgctcggattttctgattaactccctccgctccaaaggggtccggaggctgggatgctctgccagcttaaaggatgttgactctcgagtgggagtcggaaggactgcaaacagtgggtattgttgtgattatatgtgcatctctgaagctgcttcatttgctgggactgattgatttttcggaaggtaaagtggtcgctctcagtctgtgctgttggtcaggtctcgtgcagaactggatacagacgctgcggaagttgaggaggcttaatacccaaagtaaaagttttaaaatatgcatgcttgacacagagcagcctagtactggacagttcatttctgtttacccagatatttgatattgggagagaagggataatgtaccgttacctttctatttgaaatctatttgggtttagggtgataatatgggttaaatatatttccaagatgggaagttaggactctctaccatggggtgataatgcaggctgttttttgattgtcaagtttatgttggctaccacgccttaatgtcattagcaattccatcctctggaggagtaccttgatacgtgagggaaatatttgtgtgtgcctcattagttaggaggtacgggggtggagctgggttgttgattatgatataaaatggataagcttttggtttaaaattgagttaatggatgcttaacaaaaatgtgttttgaacacttaatttgcaaaagtgttttgagtacatttcccaatgagccacttcgctcatttgcctcttgagtgggaacccatatgcacaggagagcattgttgctaccaataaatattttatccatctgacataaattgtactacccaaatcaattttattattcaatgactggagagtaaaaagaagttgattaactttgctttaacagtttgaatatagagttatattttatgaaatattttttctactaaaataacatactttgaattatttaaacctcaaaaatttgatgtcaattctacatcccagctctcctttcttctcaagtgaaagaatggagttcccgagacatttgctaattttcctttcggataagtacataatcttctattgccaagttatttatgaatattcgcttatgacgttgtgcgtaatgttggaagttaatggaaacatttaagcctacccatgcttctaatctttctaactacaggaactaagatgacatcatcctaaactacatccagtatacaggttgtttctgttaatatgttaataatggtcaatgcatctcatcttcagaaagtccttttttctacaaactggcttcattagattctaaccagtttagaccagtatgagtttaggccattaggtttagaccagtgtaagaatgtaagttctaatgtagttgtaaaatcttcttttaaatattctcaatcagtgacgagttctgctcaggcacacatgagaataatattatgatgagattaaacaaatctcagaaattagtttcttccttttttcctgttatgtactaattttatttaactcccagaaggaaaacaattcataaataagcttctccaagtgctacacaacaatcttgcattattttgacatttctgccttgaggcaccaatgttggtgcctaagatcatttcaatgtctgtgattcgaataatttgctcctgtttcgtctccatattagtttttgttccttggactcggttgagccatggccctccactttagtgcaccatactcaagatggctcggtttcagagctagatgaaacagtgtctaaaggagaaccaccatggaagcattagagaaagtcaactttcacagcactatgagacagcgcacagttcttttattgccaatgttgaaaatgtagccacttaaagtcaaaagttcaacatttaagagccctgcaaatgactcagcttttatgctttatgtcctgctttatgtcacttaaagttgaaggttttcaaaggaaaattcaaatttgagttccaataacaagaaaagcagaattgtaaacctgattcccgcaactagactcagaattttgagctagtctgaaatgtctctccgggttggatctccatattcatttccaaataatatccatatctgtatatgaatctatatttctatacacacatctatatagatgatgtacctacatatttatagagattatggaaaatgtccagtcagctgggcaaactttgaattcaatgtataagccttgatgatgctaaaatacaaggatgtgggttaccatcatacatgagatgtaactcatatttatgtgacaagtcagttcttttttgttctgaagtacatggtaggaaattctggtgtagtcaaactatctcattttacataggagacaactgcaatctggagaggttaactgaatcagaaggcaaaactgaatgggagcagagttagcatcaaaatcaaggactactgaatcccatacagtgcttttaccaccatgcacttttcatttattcctcttccttaatagtgggaaagggaattaatgcaaatatgcatgggaaatttcctgaattccggaatcttgtcctgaactgtccattagcaccctcggagatatttgatggaaatatattcataggaaataagattacacaatagccacacaatttctacaaagctttgacccaacccaagcgtgcaacccaagcatgccatgtaagtgagctaaaccagatttcccactttgccataaattagaggcagaattagaacaaaagcaagccaagtggtctcctaagcccctttccctctaagatctgcactgaattttgaccatctgtagcttatatttagtggcaatgaatggctagtccaagtagaatccaacaatgagacacaataagatgatgagaattctcacataggcctcctgtccacgttttctcagaccatggcagtgtgcaagcagaaacagaacttaagctttttgaccactagccaattggaggaataaacaaaaaggcaactacagagcaagccacaaaatattagggtatcgggtccctcattctttctacctgcaaatgataaagaggcaaaaagggttatctcaatgtagattgccaaacttttcactgagactgtaccacctagaaaatacggcccagaataaggccagggaattaaccattctttttggtggagaagtgaagatgaggcccagagcagaatgcaagcttcctttcggcgatgttgaccttttatactatcctcacgaggcaatgattcttcattggtaccactgtggagtattttctccagtgagactatgtgcatccattaacttagaaagtggttctaagtctatttgaatgagagggtctacattagagttgggataaaggagtgttaccttaataccatcatctacaatggctagtgaaaattagccttggatagaaaaaggtagagagaaacatttctcctcctatctaaattagattctgagttcgataaatccctatttcaaaaaataattctctttcagttgaaattcttggtttaggaagcaaaagcaatttgcaaagaggattaaaatgactaatgggattttaatataatgatttgaggttttacacatatccactcattaatgaggggaacaaggaagaacactcacaagattaatctcatcatttcatagtttagcatgtaataaatgtcttattgaacactaactgtgtgcagggtcctcttttaggcattgacagagatggtggggaggtacaagatgaacattaaagggatgtaccctcagtaagcttgcattctggtaaaggaaactaattaccaaactagacagagaaaataagtgctgggcataagaccaagaaatggcctgtagaagcacagatggagtggtacattccggaaagggctcaaggaaaggtttcatagagaaaaaacagttgtacaggacttaacagtgtgagaagcagttcctaaattggaggatggggctgagcaaacaactagagctaggacctcaggcagtgacagaagattgttttcctggataagggcagtggcttgtagcacatggacatcaaaatgttgaaatgagagatgttgctgaagaggtctcttgggctgcaatactgagagtgtgcgtgtcttctccagtcagtgaagagccatggactctaagtcttcagctttagggaagccatgagcaaggcagcagaccagagtttttggtgggtcaacctcggagtaggtgatgatgacttcagacggaagagagcagaagcaaaggtacctgttatgcttctggaacaatttaggtgagagatgatagggcaaaaatccatagattgccctcctcaataaaacatttagtgtgaagtagcaatttgtagtttttccagaaattcctgtttaatgtaatattcttggtctgtatcatcttgtaaaatacaaaaatggcacaattgtattttatttcagggcagcattgtttagctttaagtatgtttcttacaagaaaagaaataaatatgaggcacacagaggccgtaaatagacgtaaggacctccatttatgctgagaactttaaaattctgatagatatatctgacatcttgcaaggtctttaattattttgaactttccattttagaaaattttataccaaaaagtatagagaatggtataatgaacttccatgtacccattatccagcttcaataattaccaatactttgctatttgtgtttcaacaatggcttgcatttaaaaatatttttcaattatctacagtattccaggcactctgctaggcctggtatacaaagaagaattaaagatagtggctaccctcaaggaactctcagttatacaagaagatggggaatataaacaaagagaatgcaatacattgtggtagatagatcaatacaagtgagttcaagatatagaagaagaatggaaagtaattaaggccaaggggaagagatagaagtggttagagatgactccctggaggaagtgacttctagctaggtttttatggatgaagaggagtttatcaaattcatatgccagaaaggtgcctgtgcaagttctacatgctgggtaccaggtaaagtaataccatgtcccgacacaaggatgtgggacacaatgtggaattcctggaacaacaacaaagtgtaaaggggaattgacacagttttattccttatccttaattatatacttatcctgctgtctagcacaatgcttggtatatagaagatactcaaaaaattatggcacgagcaccatttactcccatacagtaaaactgccagtgcacttatactttcgctacataattgagatcctccagtgcctcttgcaagtttgcctggaaactgttgattagttaaaaatgtttttctaatctctttttttcttctgctagtgagatttcacatgaaaatcctgctgcaaattagagatacccatacaccaaaggcctctggggcagctgttcatcagaaccccatgaccctggcaaataatttcaaatgacgtattcagcggtgagctgaaaatcccagcttccatggactctgacttggctggggaagcagctctttcaattcgataatggaaaaaaaactcttagatttctaagtgaagctgaacaaatgtgtattaagcacctactatgtgaaggagaatagagggcgtagggcgttttactgtccttaagaagtttttgaattggttagagaccaaacagctcatgaataagtaatccacaactagaaagtgtctggtgagagggaacaaggactttagaaaactcaaacagtcatctcacccagttggaagccttcacggcaggctgtaagaagatggtaccgtttgaaatctgatgagttgcgggaccaaaagactgagaggtaaagattggaagctaaaaataggaatgcaaactttaattttaaaagaaaggcagtttccttaagtccttgttcctgatcaggttggttcttaaaagttcgttaatccatttaagataccaagtatttgctctggacctggcaatgggcttggtaatgactggtttgggagctactatttttcaattttgcttgctttaggaacacattccccaccccacatgggagcccagagctggaatcttaatggggaggagggatgaggttggaggggtgtacatttcaatggcctccaaccaaagatcaccaggagcatacctatagttgaacaatttggcttcatttctctttccgagtgggagaagacacatcgtggagaaccatagcgcatctcagtagcagggtgtcagaaagaacttgcaggatttgagcttgggttggggatttacgatttaggaagcagagctttgctctggattggatggagtcaagaagtcaggataattccatgattggatatcttaaatcttatctacaagtaatgaagaccagacagaagctaaagctgtaattggcaaagaagcaaactgcattagctaggatgaaaggtatttggtcatttttgtggtttaaacaaagatcatgtttttgcctcttctcagatatgattacagagttgtcttgcttttgtcttgaccaatcatagtacagagcagtcttatctgacgttaatattctgtaaaattttttatattcaataagggaatgctaaagcctagctgataaaccagggcagctccctcaggatgtcaggagctgctttctctcacacatgataagagagatggcagagtaaggtgaggggcaggtatataggctatatagcagacagatctgagtttaaatcctaattcagtaacttttaacaagttccttaagcttcctgggtttgaattcctttctctgtaagatgagactaataaacctaacctttcaagattgttgtagggaatacaaaaatataagagaaatatctagctctgtgcttggactatacttggcagccaataaatgcctttcttgtaattatgttgggataacataacatgttcaaattccttgagttctgtcaggggttgttaaactttaatgtgtatcagaatcacctagatgacttgttagaacacggattgctgggtctcgccctaggagtttcagattcaatagatctaggttaaagtctaagaatttgcctttctaatgatttctcaatttaggctgattctgatggtttaggggccacactgagagaatcactgagttaagcaataaatccaaaaggccaaacctatattgtttgcaatgtgtccttcactgagtttcctggcacctgttgaactttattctagaaatgtggtcagccagcttgttctacagtaaatattttaggctttttgggccatataagctgttataactattcaacttttctgttgtagcacaaaagatacacaaaaaaatgggtgtggctgttttcaaaaaaaaactttatttacggacacaaatctaaatttcctacaatttttatgtgtcacaaaatatctttattatttattttaattttttaaccattataaatgtaaatgtaaaacaatgcttagcttgaagatggtataaaaacaggtagcaggttagatttggcctgtcactgtaattcgctaacccctgtactagagttggccttagaagaatctgttgagaaaggatctcaggttggtgagatactgccttttggaaacttatctagagttttcgagcccttagtttcattgagcagatggaggtccagtccctctttttaggttgatggaattatctgccaaattagcaagtgatttgaattaacatgtaggtgtttgttcaataaaaggtcttcccttcccctaattctacatttctaggccaacttagaggactgttatataaattaagccattcacatgattttgtcaaagaatgagtcagtgctgggggtggactgtttgggtcacccatcttattgattttcatttgaggtttcattgcctcttggataaggtggcattatttccttttcactaagtttggaaacacttatctagtggatttgttaaagacatagttcaccttttcaaattaaattggtcctcagagtgttgcattacattgggtttagaataaatacatggaatcaataaatatttcaaaaaaataaaatcaccttaactctggattctcttgaaaataaaagatacataactagtgggtaagatcatgttctttaaagtgagacagccctgaagtcaattcacaggccacatggtcttggacaatgtgtagaaccaccctgaaccttagttctctcatacataaaatgggagaataatagtggctacctaataggattattgtgagaggtaaagtaaatgatatttgttaaaatcttgcttagcacagtgcctgacagatagagctcaacaaatattgggtgttgcttatagcatcagtatcattgctgttttgtatccatcatacgtattactaggtatccattacgtctgttactaaacatggtcattcattcaatcatccatgaaaaaaggtttttaaatgtgatctgtgtactaagcactgtgctagtaattgggaagttaaggcatagtcttggctcctaagggagttttacatacaaatgaacatacatataaactaaatggttgaggaaatttctccgttctcacatcgcaagaattagggggacataaagaaaatgagactaaccagtcctattcagaaggtgaggggcatcagaagggactcatagaggcgacctctgagctgtatctgagtgacactctcagcacatcacgcatccttgggaactactgacagttgataaaacctagttttgaattttcaaggacatcttatgttgatcccagtttctaagtcctgactcacattattcctttttctcccacagtgccttctcttaccaaaatgccactggtatttccccatttcagctcaggtcaaaaactatcctctctctattacactttcctccctaatcagaattcgctcagtcttgatgtatgtcatacaacataacacaatattaataaaccttcatgcactgtttcccaaatcacttcctttatgttcattcattttctcctcagctggagaaaaggaactgctccacctcagcacagagtgaatttttcttgtatttcgacagggtacggagtactgcaaagtgtatcacggaggctcaacaaatacttctcagtgggtttctttgtagcatctttgatggattgttccattaaatcaatataattatttcatcttaaccccatccccatcccactctcttacaacctgactgcatgttctcacaagagaaccctttcaaaacatggggactgagtttatgctcaagattatcctgtatcacctacaaaataaaatctccatgtctttgcataagatacaaaggatcgggatcagaccagtgcctacctgtccagcctcatctccagtcatttctccttccttgtctgccttctgtccaacttcattctccagcattactacattgatgttccctgagcatctcacattgtctacagctaccatagttttgcatatactgttttccctcccagaatgccctcctctcctcatattcctggaaatgtcttttcaaccttcaactcttagttcatatttttccttctctgggaagcatttcttgactgtctcaagcagaaagctactctgcctcttccctaccctctcctgtgcccattttatactccaatactatcatactcattatttcccaagcactccttcctgtttcatgcttcgtgtctttgcttgtactatgaatgtctcttcttctagaatacaattcccatcggtcttcaccttattaacaccttctcgtcctttaagctcagctcaggagtcatctgttccagaaagcttcccttgaaccatctagttgcattaagtgctcatttctgtttcccaaagcactccatcttagcacttcagactacattaaattcttgatttctatgtctttctctttgactaaacttcaagcaccaatacgcagagcacttatttctgtatccagcaactatgcatattttcttcatatttctttctttttctatatatataaactttccagattgattatttattacttttgtaatggaaaaacatacttcttttcatcacttggttttggtgtccaacaatttccaatgctatgacgctttcacacttagcttccgtttaatgatttatgaataaatatatataaaaaagctcacaaattatgtttcatcatacctcaacccaatggttttcagcatggggggaagtgattctgtcttccttcttgcccccaggacattcggcagctcctggaggcactttcggttgtcacaattccgggaaaggtgctactggcattttgtaggtagaggctcaggacgctgccaatcaccctatgacgcagaggtcaacacccacagcaaagaattgtccagcccaaaacatcaatagtgccgaggttgaggaatcccacctaaaaatatgttttaaaattatattagttgaagaccattatagaaactctaagtttattaccacgacctctgaataaactttcctatctatttttatttatttgctttcagttttttctacatgtagatttgttcctttaaacttaataatactgtatgtattataaaattttatgtaactttaaattcaacattacagcataagtatttttatattagattacagatccttcataaatattttaatgcttacattatattctagaaatgttgtgctataatttaattatcctggttttaggacttgtaagttatttgcatttttttcgatatttgaaatattctgtaataaaatcattgtgtgcaaagttgcttttatgtttagaattacgttcttgggacagagtcttagaagactcatagaagaagaattaattcttagaagaagaattagtgggacaagagagtgaaccatttaaagtctcttgacatatatgtaaagccgaattgctttccaaagggctcccacagatttacctgccccactggaatgtaggagtgccctgtgttttgtgctgtgtcatcgctatgtactgttggttaggggacattctgaaggtggatactaaagaccacgttgtcaagctcaatgttaagaaaccatctcttagggctggactgctaatgcctttcaaaccaacgttaggaatcttaattttgtgcagttataaaattcccattgtggcttgaatatgctcttcctattctgccctctgtcagtcaggatgtgctccttttatgaaatggtctcagccttttatcaatcatcacactcatctcaaccatcaacactgggcttagtaggcatcagattatttttgaaagaaaaaaacatgacgtagttttgcccaagatgaagtaattcctgggtctgtatggatttaggaggaaaatgaacatgcataaaattattgctattcacaatcaaataaatatttcctgagcctgcctaacatatgcattttacttctataaatttaaatagcaggaaaggagggtgtctttttttagagacatgcctatgtttatctcaagtaaaatgtggtacatcttgttcatgtgacaaagtctggaaccaagaatcgcagatattttgagtaggaagatatgaaagccaatccaaactccctcgtgttttaggtcatgatgaagtgatgaggtgcacagagtccttttgtgaattaacagtagagcttggttgtagaggcagaacaacactgaggttaggagtcactgaaccttgaagatagacagacataggccaatcctgtcccctgaaacatgctggatgtgggtcctatgcaaatcaccaaacctctgaacctcagttcccttccccatacgatggagatcaccataatgccaacttcatagatcttgaaaatcatacagtgattttgaagcatagaataattttgagacaatgcagaaaccatattgtaactccaattttccaagtattacttcagtctctcgtcttacataactactagtagaaaggataccaaacattgtgaacagaactgccaaaaacataattttctttatgctgactctgaatattttgtgttgcaatttattctacactcagttctgccatgtatcagatagttcataggtattttctatatccacttttatggaggaagaaatttgttcaaagaagctaagtaacttgtctagtttatgaacaaccaaacagcagaattggaatcaacctcaagcttcagaagctagagctcatgttttttccactctaaccgtctttgtaagtgctgagttttttctaaatctctagaagtgaagaattactctgcagtctctggattagtaaagtcaagatagcatgtttggggtcaagtaccttcccagacatccatttgaaaagaattaagtacatgaatgactttatgtgtcaataaactcgtagttactaatgattggtcacaacaactctctaacgaataaataggagaatattgaagacgaggcagcaatgaggtaaattggtgatatgattccaaatttaaacaaattacaggggaagatggataatgataaaataattagaagacttaggcacctgaacaaatactcaaatcccacatctgtcttcacaatattcagctgttcctaaataccactggtccattgaaggagaaattagcagaagcttctaaacatcacctgagtaaaaagcagattaactccttcctgttattgcagatgttcaaggagacacagagggaattagccaaatggattccttcgtgacaatagaagttgtatagctaagactttttttgaaaatgtgcctcattaaagacttgcacaaaagctctgggtccctaacaagattctagactaaaaatataattctcaaaatagtaagctggcctcagtattgttgtatctcttctacagtatatcaacaataaaactaacacatagcttagcattttataggtgtattcaaggaaaaatgcaaaatcagcagagaaattctgtagttacaaaatcggtgtaaagctcagagttgacttgtctagataatatgtcttgactacacacattttacaataataggcactgttcttgcagatggctgtctagggtgagtggagaactttttccatgaagacaaatttcctccccgaccatattccagagggacgtgaatatgtctgttctttaggcaacagtttaaatcctggaataattatttaaggaaagtctgtcagttcctttaaataaattttctcaggttgagaagggagggatatttttcaagggggtagaggtggcttgagaccttacgctatgacatctacaacataagtcacttcctcttagagagctttcactcatttcattgtaaatgatgtcagtggtggtatttccttactgtcccatgttctttgctcttagacatggcttatgtttgcgtagtaagccatagaaagtctactgatatattaagtacattatggattctgagataccgagaatattggtctgagaccaatcccagatacaggcagggacataggatagggtttaactaactctggttgtcctttccttctttgctttttctcctaaatgcagatgaatactgactatattcacactaactatggtgggaaagagtggaggtgaatcccaagtagagggttaaaagttaaacttaattacattatttctttttctctaccttctctttggctaaatagaattatttcaaatttgtattgaaataaagtaaacaaatggagacttcctcctcctcccaaatctatatcctattagagaatatttatgtaatgtgtccccaatcaaattaatcttcccaaaacactttttaacataatggtaaagaagtcatactcagtaaatgagaattaggatccttgacgtcacaggtggccctgtcctgtctcatcaccaagtaggaaagttcattaaagacaatccaaagtgatttttttagatactttataaaactgtacttttgccgcgttcttaccaaaaaccatatttaagagattagcatgcacccttgtttacctcgaagaaagagaacaatggttagggaactgtttacaaaagggcaggaaatcaacttgcagactcctcaggccctcactccaattttctaaggaaaattcattcctgtatgaattttcccatgtgtctgtcccctctgaaattacctacctgctctcctccatcattgtgagtctaggatatctttaaagtcaagcctatcttccttttatttttttaatctcctctttccttatgactttgcacaaaatctactcccttattttctttttactttttgtttccaatgtatgtctgttggatctcttcttttaagtacaagtttcttgagtacaggaagcatgcactaacgtttctttattatctataacacatgtagcacctttcctagtgcatgtaggatttcatcaataaatcattggcgtttaatatggagaaatacatatagcagagttacatgattccctgaatgaaaaaatcaaattcttgaataacaggaatagtaattcataaaagaaataataattcataatggtatattattctattatgtataagtcactatcatatgtgatccctttaatttttgccacaaatttatcagaagagagataaatttgtatccccattttacagacaaataaactgaaggttagagaaattaaatgccttcccaatactgttttgtcaaaatattctaactaattgtttatattttattataagtccaaatcaagtgtatattagatgagttgaatgatgagattgtgagttggttataaatcatgttatcactagccataaattcttctctatgtattattgaacattttaacacgtgatttggatagtatgaatttttacttttagttcctttttgtttacttttgaaagaataaaatgataaaataaataaaaattttaagacttgtttttaaataaaatgagacaaacacggcttgttgatttcaatgtttggatccatgacccatattgctgctccaatgtctgtatgtatatctgacaatggaccttgttctgactatcaaggtcttagaggcacataaatagcatccgcctccacctccaccttgttctgaacaaacaagaactaagacaaaggagcaagagatggaggacaaaatgtggtctgttaatgatagaagccagttggaggtggtagcccaatgtgagaggcacatggatctgccgcctgggtccagaagtaggcaaactcgacctcttcatcaaaggtgatgctgcccaggatgcacgtcctctcccacagtctaggaagggcagttctgcccaggggagactcaggcttggaagagcagaggggactcctgttccttgcaggcagtttgctccaaggaaaacaaaagggagaaattgagcaaggaagttatctttcttaaatataccaatcagataagtcagggaggaagtgagggtcaagtgataccaggatggtttgaggcagatgcatcatcatggaaaccaaaggctgcagaaaaggtgcctttgcctaacactgacctatcgataatctccaaatagaaagtgctagttttatgagctaaagcatgcatggattgttaatgataaagccacttctaatcaaagcgcgtggaaatattcaccggttgtgtgtacagtgtattaatgtttccttacatagaagtagattttttgtttgttttcactgcattccagggactatctggggtcacctgggaccagaatctccagcgtacttgattctcatgcagattccttggtttattttcaaattcatgtcttgggagtagagtcagcactttgcatttttaacaaacatccaggtgactgcaagccaatttaaatttgtgaaactctaatggaaatctgaattatctgaatcaattttcatttttttaaaaactctgtatgttccaaatgtacactgttcctttccagtaatagtttgaattattgccgatgatgggtttttgggctttttctttccccaaagattggcacctgagttaacatctcagccaatcgtcctgtttttttcttcttcttctccccacagctccctagtacgtagttgtatattctagttgtaggttgggactctcattttttactggagatcagtgtattcatttcttaaaatcctaagtgtctttcacactctcagaatttgagcctttctgcacaaagaggattttgtgttatccttgatagaatatgggggcagtggtttgataaatagctttttagatgttttctttatttaaggtaccagagatttttttaaaagaacatttcatttgtttaataaatggtcccaaacataaaaataatttatttcacattttatgatttgccttgggaattatcattgaacagctaagaagtataaatttaattttgatgaatttttaagttctattttattttttcctgggaccttttttgtttttttttttgttttgttttgaggaagatcagccctgagctaacatctgctgccaatcctcctctttttgctgaggaagattggccctgagctaacatctgtgcccatctttctctattttatatgccacagcatggcttgatgagcagtgagtgggcccgcaaccggaatccaaaccgtgaactccaggccgctaaagcagagcgtgcaaacttaaccactatgccctcaggctggccccttcttgggaccttttttgtctgaggaattcatagctatttataaagtggaaaatcaatggaaaaatattcctcaatatttataatttattaaataggcaaatgtttaagaacattccttttccgtgaagtaagttacaccaaagaagaggagagtctattttcaaaaatacaaaagctcttcaatatatgcacttcatgtaagttgccttagtgtggtcaggctgctataacaaattaccacagactaggggcttaaacaacaaacatttatctctcacagttttggaggctggaagtctgagatagagtgcagcatggtcaggctctggtgagggccctcttctaggttgcagactgcccacttctcgttgtgtcctcacttggtggaaaaagagctaactagctgtctgacacctcgcccttgcaacccaattactttacaaaggccacacctccaaataccatcatattgggattagggtttcagcatttgaatttgaaagaaacgcaaacgttcagtgcattgtacacatgatcaaaaatcttgaaaatctccattgggccttccctcctcctcccattaaaactgcacgccccctgccctttcttctaggaccatctgactcctgtttctgattcgtttgtccccatagtacatcgttaccttctaatagactttattttgtttaaggtctgcttagttatttttgcttctggtatttcactgacgaattcctggccccaaaatacaccagaactttgtaggtgctcaatgttagttgaatgaattgaacacatttcagtcagagtttcaatgggttgtagcccctgcctgatggggtccttctcaggataaggggactgctaggcatggatccccattccctgcacatatgtctgggtccctgctcgccttatgctggtaaaaccttttctggggcattcactgccagagaggtgcacataggaggcaaagcaggaattagcagcaagtgtccacgaccagaacacgagagaggccagcttctggagttctcattgaatgagaaggagcagattctttattgcttcccaggctgtacctaatttagtcaaaatgttgctgaagaaagtcatttaatacaaacctggccaagcagatcccccgttccttgcctgaattgttttagaactctgcagggtgtaactatgtttacaaatactcttgatgccttatgaaatattttaggaaaataagtggaggcttattgaaggaactccaatttgggataaggggacatttgagctcagtccctcaacacatgctttcatcatatgtgctccttgtttaatcggaacgatttggagaactgacaaagaatcactttagaagtgcatattttctatggaatttcttcttccttttatacacaatcatagtgtatctactttatgcttgacattaagcaagataatagtgctattaaaaaaagaaataatagcaaactctgaactgagcctggtgctattcagagcactttgtatgttattatctcatttaatctttgcaataacttaacgaatatatatttccattttcctcattttacagatgatattaaggattgtgcccaaggccacacagctgtggaatcagggtctgatcatgggtagtctggttgcagagcccatttttaatagccttataccaactctattacgatatagtttccttcctaaagattttaaagtgggaagagagatatataaacagaaacatcataaaatatgatgaaagtggtgcgatagaagcaaaagacaaagcccaagactctctggagctggggaagcatcaaaaagagatagcatagtgggctttgagggatgattaggagttttccaggtgaaggaaggaaacaaagatgaaggatagaaagaggaagaattttaataattagtcctttaagaagtagcttatactagttttcagtaattcccatccatactctttcttccagatacagtttgagcattttggaaccaaaccttaacctgtgtttatttgtaaataaacacataggtcactatctgacacgatagcaagttaaatgctgtcaaagtgtacatcattacaggatagccattgtaataacagaagacagtgaacacgcaccactaaagatagtgatataaaagtacagaactattttcaccgcctattgtcaggagcaaggggtagaccatgtcatccatttggccttgtgactatcctctctcatgcttgtcttaaataatggccatagtgcacatgaaaagtaccttattttaaaccaagcttccgtcttcagtgttattaactacactctacagtaggcagtaaatggaaccttttctatccggtctgagtaaacatttagagatttctatggacctactgatttcaacgtgttccatcactgttggatttcaattttgcttggcatcccacagctgtgaaagattaatccccatcactgtgcccagccatatcaatcttctcacagactgtgcatgtccatcactctcctcccctagtaagagggtatctgcaaattctggtattcctgctggtgaaaatcaacacacctcttccaggcactgtttgacatcaaagacacagagcaggattgagtactctgatgctccttgacagctacagatatttgcaaatttagcttagattattttagaggtgtgcatgtctcccaaatagtcaagctctgttgaagctatcctgtaataaacctccaagaaagatgccattgcttacctctgcaaaataagtggcattaggaaatgatcgatccaaagtcttcctttctgtctcaatgtagttgaaattgttctatataaatgacacatctactgaaatttgcctaaagggaaaccatactttgtgtgttcctcttcatcagtttttatcatacaatagaaggaaaaaagtctgtacgtattctcacctccagaggagtctgtaactatcccggcttacccctcagtgtgaagttgttagaaagtacagtggtttttctgttgccctttgactttagtaggagtcttccttttccatgcatttctccattaagcaccttattttccagctgaaggaaggagcacagtggcaggttttgtagatgtcacattggatttgccttctcttgaggaggaagttcactggctgttaggaaccctgcctaccacatggtctggacccttcagtctggtgaattcacgtagatttttctacaatacttccgttaggacattttcctataaatgcttattgagaaaggttactaaggaaaccagaggcccagatagtagcaatttgtgctaaggttaacaaagtgttcaaatgtaattcttgcctggctcacagatttgactcctaattttctcagaatatggagttgagacagattttacaagtattctctcaagagggtcaccagtcaaactcctgccttccttctttcaccccaggcaggctgcacgtcagaagggatttgaggctggaaatcagagaatgctgtaagaattgagaatagccagcaacgtctcctataagatatgcaaatcaaaacattgcttttagataattctgtattttctgtttgatgattaaattatagttattgaggttattgatataagtgctattattgtacttacagcaactataatagtaccccagagggcttccgcatgcatctcgttatttgcctccataatgctttatggcaggaaagcagatcattaacccatatctgaaggtcatgggcactgaagtgcaagagtgtacacaacctgctccaggtcgtgtggcttgttagtgaggaggctactgacccagcagcaggacacggggtttgaatccagacaaacctaatctctctcttcctctctctcccttctgtccttacctctgtctgtctgcctctctccctctctctctttttctctttctcttcctttcttttaaaacttggaacactgctaataaacataatacatacatcagaatttttgtgtgccttaggtgaactttaatgtatttaaaaatgctttttatattatagatgctatgcaagtgttagtaatcatttatgttattcttacttttgttaggtgcttgtttcaccgtattattctactcagttttagcaaaaaactgtcttaagcaacttataaattgatgtgcagtggtcactattttttttgtcagggtttatgtttttcttcttgctttggctgctaggaagctcaatgtcaaatttaaaacccatattgactaattgcctattgactaaaagcattataatatgtttctttaacctggttttattttgttttaatttttgtcttgtcactcattttttaaatctattattttattcttctgcagtgaatacattttttaacatcatctcaaatgaggttgggaaaattaacaaaagaataactagataataataatgaagtcatagcaaactttaacaaaaaatgctctgaatttttatctatctgactcttttcagtgggaaaagtttatttgctattaagtataacaattaaatagtagcaaacatttattgaatgcctaggtaatggaaggcacactggggttcactgagaaaggaaaagcagatccttatcaaaaggtttacaatcaaatttagaaaatcatgcatagacatgaagtgttagatgtctgaagttggcaagtatcaagaatacacaaagagacattgcacagggctggtcatttaataaatgagcattgctgaggattaaaaatgtaaacccatagtttatctccttcattccattcaaattataagcacctaaagtcacacttattcttccttttttctctctggtcaagttggaaaaatgataaataaagttagaataagaagaaatgagtgtcatcccatagatgtatgaatttaggtaatttctccttaatggacctcagtttccgtatctgtaaaataacattaagatccctaaaatttctttatctcagactttatctgcttatctcagaagcagcttcaagtcaccactctctcatgtgatcaattatatctccaaaaaaaatgatttcactttatgcaaaaaagttgcagagtagatgataagtagatttttttaatgtcttggataactagttatttaaagggacatattggaaaatcattttatcaagtgtaaagaatgctggagatggaaacaaccttggcattaatcaggactaatcctctttttctacagatgaggacccggaggctcagaggcattgagggcattgtacaaagtcagactcttagctgcagagctcatggctgaaggcttccgatacttatcgtgacttcagtgtccattcacagaaatctactttccagataaggaggaagtagaaacctattccactaagttctagacagactatatattaaaagctttttaggggccaaaggctatataggttagggttcaattatagacaaatgcattctatcagattgcagaagaaagaactttattacctagtattaggtggcttacaaactagcgggaagggctggaggaacaaaatctaggagaggtttctaggaacaactcctagctcccagactcacccatttctgacgtgattagcacagctgaccactgcaacatgagatctctgtatccaggagctgtgatcacagagcccgctgcctctgccttagccctggctctctcgtctctgctccaaatttagatggaactgaaatacagaatgctagctgcaagggagtctggattagatgtatttaactttccagtctccataacaaaggatcactctcaagaaggagcttgaaattgatgttaagtgaaacaatctagactatctgccaagaatccaagaggatggtaaataatgattaggggatgtgaggaatgatataagacagagatgacaaagtgatttcatcttgccaggcagctctagctaattgactgccgaagagatagaattgagaaaaatttgagtgaggcatctggccagcaggataaacctggtgactgattagtgatgtctgccagcagtatgggtataaagcaatcagagttgtgtgaatactacttatatcccgtaagtcaattgccacttgaccagcttggttggtagattattccatcataccttgtggcactcttgatgttgttgttgcttaattgtttaattatatcttgattgacttcttagcatcatcatgatgctcatgccttactgaataaagcaaactgtaaattatttgaagatttaatcatttctacaccctgtacagtacttgatatacattaaattaatatctattgatttggctttaaaatctcaatcatcctatcaaaagatattaattcagtgttcagtttgcacaaaataacatcatatgtcatggcctcaggcttagtgggatcaagcttttaagagatctccccaagacttctttataaaagagcatattttttccatgcttacagaatcctaagaagtgaatttggagcaatttagaaggtgtacttgtttatggaccatggactcagtttattactttgaacccatcagatttttatgttcttgtcatcactttctaacttgagttcctgtgttcacttgagctgatatttcttcttaaaaatagctttgctctgagagtatgcagccatacatcacaaagaatggatgtgcctagagttttgatgggagtgttgatttatgatttctacacaatgttatccttaaatcctgcatagaaaggctgcctgtttcttcagaaaaacacagggaagggttccatgtgactatacttgctaagctgcatgacccactctcactagagcaaagactgaatcatatttctaggggaagaagaatagggctgacccacttttggcaattgaaaatgattctcctttaatactcttcatggagaagaccaatttaggggaacattggtaaggttagaacgagcatgtgtggctgaggaatacaaagatggatttggttaacatcatccattcattcaataaatcacagcatatttattattatatacaatgtatttattattaattctacactgtgctggtgttcccgtgatatggaaggctctcaagttgcaaagcgcaataaatgaactctgtacaaagccattatgaggttccagaggagacacagtagcccttggggtggatgacagaggaagaaaaggcaactcacacttcactggctgaatagaaagactattaagtcaaacagacaaagattcaaattcacactgtaccatttaacaactctgtggaccttggcaagttatacaagttcaaggtcttcatcccttaggattgttgtaatattaaagcaatcattaattttttggatctggtataaaattattatgacagattagtaattcaaaagttgtatgaagtcaggtaaggggagaagttatgctttctattataaatcatttctaaataggaaaacaatctcaatatttctgaatcttatatgatttcttatagcttttattttattttattttatttttgaggaagattagccttgagctaactactgccaatcctcctctctttgctgaggaagaccagccctgagctaatatccgtgcccagctccctttatctgtaggacgcccaccacagtgtggctttgccgagcagtgtcatgtccacacccgggatctgaaccggcgaaccctgggctgccgaagcagaacgtgagaacttaaccactgcaccaccgggccggcccctcttatagcttttaaacccatagtttttgatttaggaaaatttacttcttgtaaaggtttctattactagatagttaaattttatatttttgaaggtagtggctagggaagaataaatgtggtaataactttagtgctttatactgtgataattgaattcttaaataatcactgtcattgtattaaggagttttgagatgataatgaaaatataattctaaatctgaataataaaattaaatgccctttgctccttgaatatttgaatcgatgaaaatgcttagccataatctctcctttttttttttttttttttttggtgaatcactatcattttgaggaagaaaaatgccttgaaataggttatgattaaaatactattatggcttaaaatacttaaaacattaatagagtatggattaaaatacttaatcccttctactatgaagtttgtcatagataaataacaaaaggagaagtcacatttttcctttttctcttattaagaagtatttgtagtacagccagatttttcattaataatcattcatttgtacctttttataaagcgtccgctctgtgccagacaccatgtcacctataggaatgtgacaataagcaaagcatatgtttattattgttgctggaggagaaccaagttttctctttatcaaatttatcatatattttaaaaggagaaggaaaaaaagaaagaaacctaggtcccctgagtaaatacttttggactgctcagtttccaaacccactgtgctatcttcaacaacttaagtaagccccaatctttctcctctcattttctttctttcttccatcataaaagtaaatttattaactcagtaaaacacattaatgcaggcataccactcaaatgaatagaatatgttgttaatctggtctcaattatattgacactttactacctttaaacagaagtagatgatgcctattcaaaaaaggtgtatgagtgtgtttatggggcaaaggggagagggagggaggaagtatttagtcttctattagaaaggaaacgacaggaccagaagctgctagttctcctttgagattttttttaaaaagatcatatgcttaatcatttctagatgatcaaaggtttctcctcagtattaacttaatattaattctaatcacatttgtaaggattttagaagaattcatctaacacttctaccaaaaaggattttgaaataatttatctgatactttcaaccaaattgattcaaatatttagaacttctaagattaattttggattagtcagctcaggctgctgtaacaaaataccatagactaggtggcttaaacaacacacatttattttctcacagttctagaggctggaagttcaagatcagagtgccagcatggtcaagttctggtgagggctctctacatggcttgtagatggctgccttctcactggatcctctgtgcgtccaaagagaaagaaagagagagagagagagagctctctggtgtctcttctaaggagactctattggtttagggccccatccttatgacctaatttaaccttaattacttcctttgaggccccgtctccaaatacagtcatactgggtgctagagggttttaacatatgagttttggggggacacaaacattcagtccataacaagtagatccccatatcactctagaatcatattccataaaagagtgtgaatattttgaaatggataacagaaaaaaaactagcaaaaccaacagagtgttgtagcaaagctatgcaccctgcctttaatgtgagttttctccttgagcattccagcatcaaattggtttggagaagtcaagttggttttgtaagagtcctggagcaaaaggctatgattgcattaatagctgcagaatttgatttggaggctataatttcattggcttcaacatcgcatgactctccactgcttagaaaagatattctgtgaacctacaaagggggaaaggctctaatggcatcatgcccgcctgtacagagcattgattgcatcaacttggcgttaaatcgccccagaaatctagttagatctctcctcggtgacttggggattttgattgcagaatggctatgagtggaatgttttccaatatcgaaaacagcaatggagattaaaaggaactcagtcgtattcattctagccaggaaatatgacagaataaaaaatccatagcaaatgaatcaaatgaaccttttggcaagtttttcactttctctcaacattattactcaaagtcaagagaaaaggcaaaaagtaagaagatcaagtagctatggtaatagatagtcacactggctaatggctctagatcttgcaggaaaagaagacatttccctggatatctctttcccctacagagaaagaatcagcattcccatgggtggtcgataaaatctatctcatctaataatcaaaccatgtaggcagaaaacccaaatggatgaacccatagtcagctctcccacaaggagtctattagaatgacatttaagggtattggaactgttttttaaaccaatgcaagcaaagtactttccattagtaactttccaggtgctacaaaaaaatattgtgactggtggctttagtatttacaaaggacttttttcaaagtgtcccaacctcagtctctccctctcttccaagcagtctgtataatcacaggctcatttttcaggatggctgtaaggaatggtaggaagagagccacgtttatacaaagatatgtgctcaatacatcactccaccgaaagctgtgacctgtgggcagttaccgtcccctcggaccttcagatcttaccgttcagagggcttgtgggcattcagtgagctgaggacacactgcttgaaatgtattctctaaagcctcatatctttcttcctgtcagaaaaaagatccaataagcaaattggcactaagatattaacactttatttattaccattctcagagatcttacaattatttaaaatttaaaaaaacacaaaactcaggagaaaacaaaatgaatcatctcgaataatgaaatttcaaacagcagtgatggtgattccactcaaataatatgcactcacttctccttgggggacccccaggcctgtctcccaaaagccacatcctgaactgtgagtttagttaaagattaccaggcagaaaggtgtttcccgtagattggggctcctttccttggcagctgccatgctgtggagcataatgaagattctccctccagccaggtagggtgggtggcatccccttctccaggatagaagagcccactcagagctagcatggaagagaggagcagagatgagaactgagccctgggccctgccaagtccagcctgttatttcactcggggaaacgcccccttaattaattgaaaagtaaaagttattgaaggaccttgctcaatacttattggattttacttttctaggcttttcagccttccaatattacattgaatcaaactctctttcacttatgacctgtttctcagataagttcagacttatctagtaacttggcaatattgcaaataaagaaggtcacaattctggagcaggaaagtgaactggctgttgcttttggagttcttgtgttgccccagaaatgagagttatttgtcttcattttcattttcatgtctatccttctttaacacatagttttatggcccttgctctgtttcttcatttgatcctcacaacaaccctggaaaagagaaaagtctagggtttatcatcgcattgttccaaatgtgtaaactgaggctcagagagcttgagaagaatgactctatcagtcagtgtttgaattgaaactgggagccaagttcactgtgagcatttcccaccaggctgagcctctaaggatcaaatccaggagactgcagatagggcttcgatgaggaacaaattaggttatgaggcgctgcatgcagttaccccagtgtctggcgcacaataagtgctcaggacaaactaactgctatgaatgtcattggttgattattgttattgtgattatttctccccatccaggagggaaccagaataaagtgaaaagacatccttgccttttgagacttctctatgttgaagtcgtttttatcatcagcaataaccatttcttaagtttccagtgagagcagaaggctaggtactggaaggatgaaatgagaaaggatcagcccaagtcctcaaggcactatcctccagctgggaggggtgaccagtgagaacttaatgtccaggaatagaactcagagtagcatgagttagagatgttggtggggacttgataacagaggacagggactttgaaccggtccctcaataataagggcaatggtaattgaatgaagtagggaagagatgccaggtaccctagagaggctcagagaggagtctgtgcgtggttctcagcatcatttgtggaaagtgttaaaaacacacataggcaggcccaccctgaagattcttattcaataaagctggatggaatcctaggtttacaggtaacaagttctgcagtgcaacaaacccaagttgtggccacaggggaccattgattgcttttgattaggtatctggtactaattcatagagatgaattgaacttgataagaaagttagtcaaatgctctactcacagaaacagtagctggcatataagaagtgtttagtaagcatcttaaaggaagaatgtatgaaaggtagaaagaaaagtgaagaaagatgccagtattcccttgcttaaagtctagcctgcgctgctgcactgagattctgacattgtaattcctgcgcttgggtagatcgctagttggatggcagtgatattctactgcactcacactgatatccacacgcctgaccatgacccagaagccctatctgaactaacataggtcaacctctcctgccttgcctctaccttcattgctcaccacccttctctttgttcctcaaaactcccaagctccttctcacctcggagtgctgccattgcctgggaagttctttcccctcgtctgcacacagcctcttgtctttaaggttgcagttgaattttcatctcagaggatccaccctgagcgtccagtcacaagtagaacctcagtcactatgtccctcaaagcactttttgcaaccccaagttgttctagtcatttgtttgcttccatgtgtttccctctcttcaccaccacccctggaccataagatatctaaggatggcatccttactggccttgttcatgactatgtccaaaatacttagaacaatgtctgccacatagaaatttctcaataaatatttcttcagtaaatggatgggtactgtcagcaggactctcctccccacctttgcccttttcatcttctcccaaacttttaattttcctctctctttctctttctccacaaaaccacacttgatttgagtggctctcaggaacttaaaaaaaaaagaaaggctgcccacctctttcttgtagtctgtccgcctgagcccatgcccccagatctgacaccgtctgatataaagctgcatgatctcaggctgccttgactctgtgccagcagaaacatgtcagggagtccccaagggcccatcaattttaggagcccttctgagatttagaggaaaaagaattctttttttggcaactagtctgagaattaggttacgttctaaattaagtagggcaaaatttgtcatatatggcccagttcggtacctagaactcacacgcgcacgtgcgtgtgggcacacacacacacacacacaatctttgaggattcaagttagtttggcttcatataatggcctacacatttgtttgcacaaggctttgatgttgataaagtgcttttgcagatattatcatattttatacctaaaggaggcaggcattgtgagtatgctcattttactgatacggaaatgaaagcccagagaggttcatgatagcgtcaaaggtcacacggctgaattggaatcctggaatctaaactggatttggttgtgggatgttctagcaagtcacttgatggagactcagtttcccttcctggaagatgaaggggttgaacgatttccaaggcagtacttcttagggttcttgttaaattgcagtcctgaatcagtaagtgtggatggggcctgctactctgcattttaacaagtgttaataggttccagtgattcccaagatgctgattcatggactacactccagagtgtgcattagagctaaactgacttttgatgggctcagtcccctgagattcataggcacgtggtagaattggaaaagcattgctctaatgagctacagttccgaggctaaggttcccctcccaggtgcacccctacttgggctgtgattttgcgggaggtcacttagactgattgagctgtttcatggggatctagctgtatctgagacaggcaatacataatttaagtttagtaaggacggggtatttggcaaacagtggctttaaaaacagaattttgagttcctcaaaagtaagtgtcatttttacatatgagtaagtgactagatatagtgtccataccttcctggctcatctttatcttggtttatcttgggatgaaagcagaggaagggttatctggcagtagatgagtagcctgaggcttagacaagctgctgtttttcctggagccatgcaaagcctggggatagcacctcagctgactcacagccttctttgtctctgccaggatgagtgcagagcattgtcactgtggacaagcctctatggatttgcatttgagaagaaaacggtggggctgataaagataaaataaatgactgtattttagtttttttatcatttggtaaagcacaagtggattttccattatgtcttgtcaagacctgaatcctcagtcattgagggatgtataatcgcctccgattgtccactaatcacagggagtgaaatggccaaggctgctgccgagggagaggacagtccttggtctatggaaatgcagttgcagtcacgttcaaggtgcgtcttgtcctctgcaagaccacagcctggatacaagtcattctcagcagagacatggaaatgtttctctagatggcacaaggtggccagaggggcccctgcagggcctctgcagctgagaaagatggagaatgttcaatgtagggctgggttgggggccgtggtgagtctgtgtatgcacaggatagagctggatgctgtacttatgttcacacatttgatcataaccacctaatgagttagatatggctattccccttttaaaaagaacggggaggagacaaaatctcaggtgaagcaactggccaggcatcctgtgattaccttgattcaccttcctaatttattccttattccagttctcagaatcaacatttttatccttctctctggcacctatactcttcctaacactcccaagaatatatcccctgcacatttgatcctagactgggctactaataaaaatcaccaataatttgagaactgaggaaatagtgccttgttgagtttgtccaggacctgcatgcctagcccttattacaaagctgatcttctttcttgcagagttgcaatgctgcccctctttactcctgcaatgtcatttaatgaggaaaacacagggtattaaatcagagacacctggggttcaaacgccagctttgcagtttattaattgtatggccattaacaatttgtttttcctctctgagctcagttttctactccataaagtggggttaataatccatctatggaccattagggggattaaacgtaatgcgtggaatattccctggcccataatgagcactgagctacataatgagcatgtaacaaaaaaagctgcagtaggctgcaaataagttgtagtcaattgcagagcagggatttgaacctcagctcttactcactaacatattgcttctgccacaaatggtagcttaggctatttatagacgctcagcatccataagaagagactaaagccttgtagggtgtacattggttggcacgcacactgctgctttctaagagcatttgtagctgaggctccacagaccaatgtcttggcagcctcttgtcttccgaagaacagagaccagcataacaacactgaatttctcaccaaatacatttggttggctctgatttaaaggaaatgcaataatgtgtcaggataaaatgattgaataagtaattataagtttaatccaaaaaataaatgcaatacctgtttatacattctacatctgtactttgagattttactattttcataaatgtgtttcttaatcaaacacattgatcctgactcatagttgaaatcaacaacctcaggcaaaatgcataaggtccttagagagaatgaaatagcagggattagcttttattattgacccaccatcactttgaacaagttatttaaccctccctagccttagttttgttatctgagttctgcctcatggacgtgtggcggggacctcaggagatcatatacagaaagcatctagtgctcagcatgctgtcaataaagagtaagcattacagttacttctatgactgtactggcctttggagtcctcagggatgcaatattgcatagactctggggactgggttagtaatagttttgactagctgaaagactctagatgagtttcttcagtttcatgaatccccgttgttcttcctggaggatggaggaaaattcaacctgtcttacgtgttggttgggatggggaaatgagatggcatttattatgcggcttacccagcacccagcacacgattcttaattctctcctcactcacctacgcaatgaagcagtggccaaggactgcagcaaggggaggcaagacaggcaccacagccaaatgtgctcgcctctccctgcaggactcttgcctgagatatccacatttgctccctctgttcagtgagatctcttcttaaatatcagctcctcagagaaaccttagaggaccatccgttattactataatggctggtcagggaaatgacaatttccaaacactactttcgttcttcatagcacctgttactacaggacatcacgttctattctgatttccctattgcaagtcttccctgactggaatgtaacctccatggggccaggaaccttacctattttgttcactgcctttcctcagagtctagagcagaacttggcacagaataggtcccttatacatacattttgttattgcttccaaatctgcctggggtcagatctgcctaaaccaaaataattcctggcctagatcactatagaaatggtaaagtgtgaatatttcaaatgaaggatgaaaggtcactacaacatttttctcatagtttaatgtactggacacatcgtaaaatatttctacctccctctctggaacatatattcattgctgttttgtcagtgagctctgtttcaaaactaatagcaatggcattttaaatacaagaatacataacattctttaaaatagttaccctttctatgtgacatttcattggatgtctaattagcagtaacattttgttgtttgccatcttaaacgtaacagatccataagcctcaaaaaactaaccttgcttaaataatcagtcttcataatgagagaatttttttctttaaaaagtcctcttcttttgtccttatttctccattcctttggcaccagaatattccatttgcaactttctgtctgtgctaggctctctattaagagtatctctcttttgtaacttttgctttgtggcactttttctttggccaattaagaaaagttcatccaatttctactttcacacagtcaaggacaaaactttggcaataagtcaagcaaaccagaaataaattcattaccaagacagcaaaaaacaatttcatattatatcagcttttattttattttactgtgatcttacttttgagaagccctgttttcattatacgtgttaatatgaattagagagcaagcaaatagttaaaatattcaagcatttatttagttatttcaagctttcctatctagttcttgcatatcaactctaaatagggaaaaggaaaataaaattattatactagctagtttaaaaacattagctcatataatcctatagagtagcactgttattcctactttaaaaggagatgaaatgaggcccagagtggttgagaaacttgctcaatattatcaagtcattaaatgcttggtattggactccagtatgctcatctccaagcccatggtctttccacaattatgctctgccttcctacaacagggattcagtcaatgtctattttttcttctaacgattagtctttgatggaagtgggacaacatgggcaaaggtaggtcaaagactgatgaaataaataatgatcagaacaatcctctggatgaatagtagtggcctggataaaatactggttaaaaggaagtttcaattaggtgataatcagaaattattttctaagaaatttgactttcctaagaaatgagcaacaatctgaatatcctttatacgaaatgactacataagaaatttatgctgtttcatatcctaaatacttaaaaataaagatctgaagaaaatacttacctctttgattttaccaatctctgaacattaaaactacctcttatccctgtttttcatgggaaaaataacagcaaaagtaaatcacctcctcaattgtcaatttaatttttaaaaatattattttatgcctggcagcctgtaagatactgggagcacctagatgaatgagatactgacacttcccttaaattgctcacaggttgttggggagagagttataagaacagataattacaaaatagttcaatgacagcaataacaattggtcatttgagtactactagatatggtatctcattcaacctgggaaggacaaggaggcttcctagaggagatgataactgagctatgttttaatggatgaatgaaaaataggtaactgaaagtaggatcgggagggcatttcaggtggagaaaactgtaaaaccaggggcacgtcattgcgaaatagtcggtgaatgcagggatctacataaagtgcaatcaggctgttgtaagaaaaaattctagaaagtggaatgacacagtcatttttgcatcttcatggggctttgcttaggcgtttagatatgaggagaataaaactagagatagggcggaaagttagggtgctatagcaagagttcaaacattgatgaaagcctgaaccagagcagtagtcattggatgaggtgtaaagagcagatgtagagagtaagcaacagattctataaatatttgagctaaaattagcagcactttgtgattagttgaaagtgagattgaggacgatcaaagatgactccagatttgcagtacatgtgactgagtgagaggatggtatccataattcagataagaagaaaagatatgtatgctgtttagtagagaagattacaggcttcaattttacatctagcagtgagggaaacgtgggaaatctaggaggatctgcctagtgggctattagataaacaagtctcagcatggagatggcaaaaaaggacatagaatttggaagtgctcattccaggaagtgtgtagaatgaggccaaggatgaagtaatgcattaaaataatacttaagggtgaggaaggataagaaggattggtgacaaatttagagtgagatatcaggaaatcttagggattccagaatttccacagtgtcaaatgcaagggaaaagtgcaataagtgaccttaaaatgactcatttgaatttgaagaataggggatagtggatgagtgtgttaaaaacagttttgctaggggactaaaggatgatatcatttctacctgatcaaatagtaaacgggcaatgagaaattggagaaataagcataaaataatatttcaacaaatttccacatgaagattaggagaaaaaggtcgaagttcagttctaggggcaggggtcatcagaggcatcatgtcttttgtttgtttaggactggactaagccaaatgttagtaaagacaggcaatagaaagaatcttctacaaaataagaagatatggaaggaggattttgttccctagtcttggtttgttgctatgatgaaatgttggtcccagaaatctcaatggtaagagtttgatggggaggccagttggaatacttgatgaatctgtgagaggttcagtctggactggagtttagatgtgattgtgtgataaaagagcgggaggggctagttctgtgcacagtgaccaagaacagtggggacgagagacatagttggaaaggtctgtccataaatatcgtatcttgaagccttgtcattttgttgtcagttgattgaggacagtagccatcactgaactgtggcaaagaatgataaaacttaaaaaggatcagtagtgaccttggttatttagtggtgaccaacaaagtggtagaaacacaggccagattggatttggcttcatgaattatgactaatctctgagtccactgttacgaaaaataaacacatgagctttcattgtctcctccttgtcttacttctctttagtcaacaccagcctttaaatgagcttgaacttatactgaaaaatgcactggtaaaattttttgtatgagaaaaacctagggaagattcagtgtaagaacatcaaaagctccatttaacattcaaggtgacatttgcatgtgctctgtctctttgaaacttaaagacatttatgtatgcgaaagcctgttcatgcttggttggctatttcttttgttgtgacttgaaattgaaaaccactaaacaggatccagttacctgttctagctttttaaaaatcttcctgtggtatctttgagaaaaaaaaatagaattatttatcttaaaaaacatcatagttaagattgaattgaagaagaaacctatagcttaactttattaattttgataaattattgtggcctaattatttatctatgaaataccatgaacttgacagacagaaagctaggctataaagagcagaatctcactgtgtaagtggcagtagtctcatccaagataggtcctaacttttactctaaatcagaaccatgtgaaaactttctaaagtcttgtatattgaaaaggctttggtactcccttctgacatattgaaaatcaattctaaataataaaatcaaggcaagaaaattgaatggcattcggattttcctataatgattgcctaaatgcttttttttcccggtttcaaatatcaaattttttcgaaaaactatttggggtcaccttttgctagtgccctaatcacgtgcttatgagttgatccagcattgagtaaagaacttccttataagtcatgaaagtggccacacactctaggcaggtgtttcagcaccagccagcccttgcccccaagaaagcttccgctctcttctttcatggtgccaaagctgtgcagaagagtagagcagacatgaagaaaaggacatcattttccctcagccaacagattagttcactgctacgcgtgactgagatcatgccctggacagtgctgaggtcctggggtagccacagggaaggctcacagggataactattattctcttttgtgatctgcatgctgtctttaataactgtggttttatgacttgccatttttcaggtatcagccttggactaaattttattttaactgttttgctttggccggggtgggaagtggtgaggggtttaaaaaataaaacaaaaccaacagacacactttttcctccaattgcttatggactagtttaggatagagacatacacaaataatatgggagaataaagagatgaatgaacatgggtagcatatgaggaatattgtatgcagtctgcatactgacattgtaaacctctaccttgtggactggaatgttgggattgtttttttgttcatacctattagaccactgggcttggagtaagtgttcaacaaatacatatttattgaataggtgcaaattattattgatttatatatatttacatatacatatatttatatgtctttgtaagtgataaaatatttaggacatggtcttttttaaaaaaaaataaatctatgtaatctcagaatctggcacataaaagatcccggaggaatgtttgttaaatgaagacaattgaaacaatggattccaattcctacactgtggtcgtgttagatcaccctgcctaaggggtagatatctgtctggatggcaaaagtagctcttcgatacagttgcaggctcaggattggctttatcttgggcagaaccgttcctttcaccacattattcttgtcttccgggaaattataaggtgtggtgattcttgtcatcactgttatcatcgcttgaagacctgctaggtgccagtgtctgtactaagtatctttttaagttaagctaatcctgacaatggcagttctatgtggtgaaaattatcaatcctaacttttaggtaagaaaactgtatcttgggtaggatgaaggaccttgcaggtaagaacaagctcttgtgttcagtttcctagtttacactataggaatcataacacctgcctcattagggttcttatataaattaaaacttccacgtacaaagtaggcacatacaagtaaatactttcagatacgatgttggtactcattaagaggtaggggtgatgatggtggtagccatggctgactagcaagtggtgactagttgagtatggctggtttatggaatgtttggatagctgtggtaggaaagaaactgggaatgttggttgattcagagaaaaagcctttggaaaacatggaaaaggtttttgaatcatgagagcttctttaggagcatcggctaagaaaaactgtgtgaagtgtctatttattcataaaagagacaatagtttatctcaaatacttgagagctattaaaggatgttatgcaaaggaataacatgacaagattgttcttgctgaaattcccactaaggcagtgtagcaaacgggagcagagaatgtggacagaaataagaacggcctaaagaaaaggcctaaaataggaatggggctatgttgagagattttttaggaggtaggattaataggatgtagagtttgttaggacatggaagtaggttgagcaggagctaagagtctaagatgatgcctagttttctagctgatgagcagggtgagtatttgcaagagttcagaagctcgggttaagagacgattatgttgagttccactttgggtatgttgagtttgaggtcctatgagctatccacatagggatacctcaatgagttccacatcttttccacctacctctgcagccaacactccttagcctctgtagtgggtagaatagagtctcccaaaaattcacatccacccagaacctgtgaatgtgaccttatttggaaatagggtctttgaaggtgtaatcaagttaagatgaagccagactggatttagatgggccctaaatccaacaactggtatctttacaaggagggggagatttggagacacagatacacggaggagacaggaaaaaagccatgtgagtacagaggcagagattggaattatgttcccacaagccaatgagggtctggagccactggaagaggcaagaagtgattctcccctagagccttcaaagggagtagagtcttgccaataccttgatttcagacttctggcctccagaactgtgagagaattcatttctgttgatttaagccactgagtttgcagtcatttgttacagcagcagcaggaaagtagtatagcctccttcttactttgaattttccctgtaacacttagggccacctgataaactctttacgttttttatgtatctgttgtctatgtcacctcactagaattgaagctgcatggtggtagatttttatctttattttttaaattcactgttatgtcagcaatgcctatataagtgtggattaaagagagaaacaaatcaatgacagaactccagggaacatgaatattcaaatttaagggagatggaaataagaggagcccaaagtgcagactgggaaagaatggccaaggatgtgtgagaggaaaaccaaaaggacgtggggtcagtaaatcaagagggggaggaattcaaggagggagtaaccccttgtggcacatgatgcaaaataatctagcaaattgagaagagagaaggaaagtcttgatgaactttaggagagaagttcaggggtgtaggggcctgaacttctgatgctagatggctgcaagttgaggaataaattgttttattttgctaaaatatgagaggcctaaatatgtatgtatatcgggtgggggaaactaatagaaaggaaaaatttagaggaagataaaacgaagtagatctgtcttatgaactcatttcactttaaatttctactccatttgcatcgttacttcttagatttgtcttctaaaattttcatcatttatataggaagaagctttttttatatatgtttttcatactaactgcaaataagtgcttgtttctgatcttttagatgacattcaattttaccaaatcttttcccatctaaatggacatgtgcaaagagagggatagaaatgtttcccattgattgggaagaacctacgatcagggttaccaaccattcaatttgccttggactgaggggtttcccaggacatgagactttgagtgctaaaatcccaagagaccctgggcaaaccaggactagtggccaccctacccatgaaatacataaataatttcaattcagagctggctaaatttctttctttttttctatcattttagctatacatggtatctaaagttatagagaaaggaaagactgaagagtcaaaatcaatatacttccagccttatgcaacatttgtttaggttaacattctgagtatttactaatgttggggctgccagatcttaccttgaaattgttattaaaatatcgtgaattgtggataatcgtgagttaaactatgatatacttgaatccatgtaataacccaacttctgtggcatccttttagaaaagccttcataaatatatccccttcaattagtaaagtcaggtgccctttctgtgcatttccacagcactcttattaacttagaacactgtgttaatcagattatattgtaaatagctgcttacttgtatacatctcccaccagaacatgagatttgatgagagaattatgttctacgtttactaggcatccaataaatagctagttctactctgtatttttataaatattaattccaaaggtggcaaggaatacttaagctacgaggatttctctaaattcccgtgatgtagatacataaatttttaaaagcaaagcttatactttgctgtattaattaaatatacaatgacccagcaaattcttttttctcatttgtttattatgttaatttatgccatagcaaaattttcaagattcgcttataggaaaatcttaagaagccaaaaattaaatctgcacttaagtatattttgacaagtcatgtttgataaaaaaagaatacaatatgatgaaactggagctatcttagaaaatctgtagtttctaagcataaaatagtgtaatctatagcttttacatagtttaaaaagtgatatcaaaatgccctttgttagagcatacactgaaaacaatacattcctttgaacatattttatgactcattattcttctctgtctcaggttacacacacacacacacacacacacacgcacacacaaagttcttagcttttgctttctattattcctcttataattgaatatgttagttccccagaaataaatcatgtcttcaattattaacaagccctagaaataatggacattttaatgtaacactgctgagacaaataatacttaaaaaatatatgctattgtcttgttttctagctttaaaaatacccttttaaaaatataggtaaacatggcattttccacaacatggtaacctctctcttttatacaactgaaatggtattaagacgttatgactaaatcccgcacattttaatttaaactgtaataaatactgaaaacaaacaactagaattcactctcaaatcatcctctagaagtcaaaatgctagcaagaaagaaatatatttgtctttactttttttgtttctttagtaaagctacccaacgaagggattaatattacatcaaagaaaagtctttttcctttaaacaactgttatcatatttcacagaactgcaaattaaaaatattatggtcctcaacatattttaagatatggataaatatccttgaattctaaatattgtaatcccaccagttacaggcactattacagctgcaaagaaaacagctatttaaatattttattcccacatgctttctccctttctgcttactaaaataatcactcactttcttggataaaggccatctagccacagccccaaaataaaaccagcaagaatatctttagaaaaatataataaggttgtattttgatactaattgttgattttataacttctcactttgtttagagaagtgtaaggatttatttttggctgtgcaattattcccagtggccaaaagctaaattatttgagcaggagaaactaaattgaaagcacgaagaccataccatagtaaaaaacccaggacaagctgttctaagttcagtaatttccaggaagttcagtgtgttggaatgattcatctagagacttagctacgaaaagttcaaatgccccaccactgtgccttactttacaaaatcttaaaatgctaaactctgaacttgcaggatgaatgacttaagaagtgaactttataaatggatttctccctttaccaaagggttctgcagaagctgactttaaattgcaagctccaatgcatgcaaagcacaggaacacaatataggaggcacttttccggaatgcagttaaagttcccttgcgatgtacagtgggtttaaaattacctgtttcctcttgaggaatactgtaatgagcaggaaaatcaaaaaggaagcaggcaaatgatataattgatccatacattctcatctccttccacccagaagaggagaggggagacagaaccctgctgtattcccgctttactctgcgctcctcgcctctcgagattctctttagtcaagcattgcaaagaccccaaaggccagacagctttctcaaccaaatgctcccaggcatgtgtagaaagagttaacatacaggcctgagacagctacccatagaaaggcctgcctgcaaggttgacccttgtctggcatctggaaaattagattttgggagggttcctattattccctaactgataagagtggctcactgttcctaaactgtttgtacaaaatatatggtttataatgaacatcctgtttccttctgggaggctgaaatcttggtgcatccaaagcagagagtgtctacgtgacctgcctccaggagaaaccttggacgctgggtctttaatgagctttcttggtacatgacaattcaacttgtcatgacattttgctggggaaattaagtgtgttccctatgacttcactgggagagggctcttggatgcctgcacctggtttcctctggactttttccaatgagttttttccctttgttgattttatttggtatgctttgttgtagtaaatcataaccattagtatgactatatgctgagtcctgtgtgtcctcctagcggttctctgataaggagcctactggagaaagactcaaagtgttatagatccccaaattgtccctagatctttcttgcaggtaaaacttcaagaataggcacagctttgagtgtgacaaagagagtgacaagagaaagaaaagatgtgctgaatgactgctcctggccaacactgttctgggctatgaacattttaagcatgccaggtgtagatatctatggactgaatccacacaacaatgctgggaagcagacattactaacccatctgaaaggtaaagaaatagacttaaatcatttattatacactattctctgcctctcacactagactatgagctgctagaaaataatttttctccactcatacatttccaatgtctggagcagctcctgtcatgtagttgaatgaatgaatgaataataaatgcattaattgaagttaattttgcagtttctatcagatgatacggtgtacagctgggactcaaacccatgtctctctaatcccaaaccaaaacttcccttgctgctaagcacagtcacatctatctttactaaagaggaaactacagtacagaatcttagaaactgacccaagctcattcattcatgcaacagtattttgacccactatgggccaagattgtgctaggccatgtgatatagaatgggaaaaaaaggcaaagagaaaaaaaattattatttttcaatatagtaaaataaaccctaatcaaaaaatgtacaaatgggtaatggaactggaggatttactgactatgtaatcacataactaatatttggaagaaatcataagcatcctaaagtttgtctgacacagagtttgtgctcagactcttggtacaaccattcagaggacttcctctcagctttaccaatccgaagtgtttctgctagtgaaaatggtataccagctttccatactgaagcaatggcctgggagtatgaaaacataacatagactgtctcatgttctcaatcaaatcgtagtaattagacttcaagtgcaaaagcttcaagcctgtttacctagcagttaatacggaatgctccaataactcaagccatacatcctcaaaactcattaagaatgtatcaggtaatttaatatatcccagagctgtaaggactcaaacctaatatgagaaaagattaaaccatggattaagcatgaacaatgataagcatacacataagcataagcatacacaatgaagaagattgtgtagctcaaagatataatctttgatcaaagatacaaactttcatcttgaagaacatacaattaagtacatgacaagacatcacagaactacaaatatattgaatattttggggtttacttgaagtgcgtttgtgaactttgaaagaaagtttttaaaatgcaatgttaaagtgagtcagtcagacagagatagacagtgtatcattccattctcttttcttcctcactaatagaacaccaattttaattggtgcagcaatgtggctagagaaaatacgccatcatccaagttttcttctcattagccatggttatattacacaactgcaaacaacgagcgacaagtgaaagcctactggtctactgggtagaatttccagaccaactattactttcctaattaaaaagaaggaagaggaggagggacagactcagttggcactggctttttgcccttcaacctcccgccttgtttctgactgcaatgtaggtgagatgtctggaggtacaggaaccgtctttgagcatgagaaagaaagccacagttgaacatgacaaccaaaattagaagaaggcttaaattggactgccttcttctaaacttttgttttggagaaataaacacttgtttagttaagtcactatggtccattcaaagctgaaaactaacattcactcatacactgatagttcccttgtatgtaatcctttgcttgactcaaattgctattctgagaccgtgcctcactgaagccattttagagtcactcttacaaattacaaactgagtatctgtgggtgttttgtgatgcttccatacaatgaagaatctagacaacatgcctcgaagagccactgcaaaaatcgcatttccaaaatagggaaaaatgacaagaaaatgataggagtggtgtggaaattctcaagctgacatggtagttgagtcccttgagtgaatttcaaatttgtttcaaatatcatcatgtagctggaccattcatggtagtagctttgtaccggtgtaacttgaggagtcgtctcttgcaagtaaatgagaaaataaaaatacaacttgtgactaaggtaaagacaaatttttagcaaacacaccaggatttatacatgcaaatgattcttagcctttgatgaaatgaccttaaaaaactgttctctgattctgatggcactgacagaatcttttgacaaattatccttttggaattgtctgcagagctagtttataatccaaggaggaaaattcatttccttactttgcagtcacatttaaaaaaaagtctcacaacttcaactatgaaccataaaaagttatacagtttttcttaggtttttcagagatagcttaggagacattttgtacaccagaagaacaaaacttgtaaaatgaattctataaacaatgtttttaaagagcatttaacacagttaaagaattccacgtcttaaactgcaggaattttgcaagaaacattttcaggtagtttcttggttgcttattccatatttttatacttgtagagtactttagagtttctaagaacttttccatatattatcatttaattttcataactaatttcattttacagataaagatattgaagttcagagacattaaatatacttaccaaggttctaaatctaataacagtcagtaaccaggcttgaaatgtgggtcttctgcatccaggtctactattctttaagcaatattccttttttctgctcgcgtctcctagaataattttgagcaactgtgtatgctcttgcacatttttaattgagatctagaatgtcttcatcataagtttaattactgtggttctagatgctagaattcccagcatactgcaaatacagatattttaaaacgaaacgtgtttcatccatcttttaaatgtactaatttgaatctaactgctataccaaattgatactcatcatacatccattatttttcttaacaggtagaaatgttcatcttttttctttactttttcctgagaaatttatctacatatgagagatatatatatacatatttattgttgaaaaccttttcttcgtcatactatcatatttatctgcgagaaaaatatgtatatgaattgcaatttagttttgaaaaaaattttttgtgattatagggattcaaattttttgaaaaattctcagtttaattgaacaacaatcattaatagtaaacaattgatcaaaaactttatttcaaattttgaaaataatttaaacaaaagaacaaaatttcattggaatactatctcttggttcacatttccatggaagactcatattaactaccagagtaaaaaagggctcaaaatcaattatattcctcctttgcattcttatgggtacaagtgctgaaaattctgttcacataagtagtaatggcagctaaactcatacactgtttattgggtgctagggatgggtccaaatgcttgctgttttatttaactaatttgattctcactatctagccctatgaggtaggtagattctcatggttccctttgcataatttttaaattttgtaattttaaaatatttatatttaccatttttatctccctgagcttcaatttctttatgtaaaatggggtaataacattacctaccttacagagttattgtgagggttacatgaattaatatatctaaaatgcctagctattagtgctggctattagaatttaaaacttaggcatagagaagttgataaattgaccatagtcacacaggtaagtaagcagctgagtctgaattcaaccagagtctggctctatatgggccatctaagatttcagcagggagattggaaaggaaagagtcttgttaacatcattttataattctttaaactctttccaatttatttgccaaaaatcatatagcgatttatcacaaaaatcatttctgatgatctgtctgctgacaacttgactatgtcccctatcaattttgttgaaagcaaagaatcagaaataaactttgaaaagaatgcattaccctaggaattagcatacagctggagaacaatatatgacattgtttctgtatttgacactccagagactgtacaccccagggcaagacaccatagtaagtttctggaatgggcaagagataagctttttttctttttctttttcaatgagaaaatggtttatgaaagggaaggtatgcaggaaaaatctgacaaattgattattttaacactaccgagaatgtatttgtacctacctccttgatctagaaaatcagacagttttgtatgtatggaagtcaatgagatagaatataacatgaatggctgtctgcactttatttactgcatttcaagggaccatctgtccttgtgcagacagaagtccccttggagtaaatgcaacatcctagctgtggcctatgttatacatagattattaaatagtttgagaggtcctgaaggggagttgactattttcgtagtatgtttctaatagaatgtattgataagaaggagaaactctcattcttctctagattaaaaataatcaaaattatcattgagtaacaaagcaaaagattctcctaaatgtggtcctaaaaccagatttccactgaaagaaaacacaattgtacaagagatagaatgcatagtgtgatgatccgtatgtcattatttgtctctagaaggaatgtctactctaaatcctctgtgcatccacatcttctgtctgttccttaaaattgccactcagaaccaattcatctagtggatgcataagaattaatgtttaaaagtcagattgttttcagataatccataatatagacaattaacctaaagtactgagaattctagtgggttaactcataagggtctctttaattttagtcactaaattgattatctcactactgtgctcttgtaaacttagaacatatccaaacaaaaaggcatacatttcaaaacatatcctgagaatgccaaaggggtaattttagagaatatcagaatattatccagctacacagtccaacattccgggaaaattaattatatatcaaaatatggttatagcaaaagacccttcatttttattaaatcatcaggtttgggtttggccataaaattctaatttaataattagaagattaacaaaatattatactaataattgacaattaaagaaataaaataagatgtgtttttcaatacttcctcttataatggatacatgctgattatatatggtttgtatataaaagacgtcaaaggatagatagactttttaccagaactattcactgatgactcaggggagacaatgttaattctctttgtgattctggtgtccatttattgacaccataatccttgacccaaagatatatcaaaagtcccatgaacaaatatggcagagatggccattcattaatattctactcattaacatcaaccacacagatttgtcaacagttgtgtctagcaattcagcaaaacattcattattggttttattttaaaaagataacatgttccacataaaaccacacacacacaaaagaatactgggcagttggtaactgaatttatttgtaatcacagtttttcataatttcaattctacaactccacttcttaaaattaaatagtggatatcaagcattcaaatattttataaatgttagaatcccaaatagttttacccctaaatgtaactttctgtatttcattggatatgttaataaaaagtaacatggcatggtaaacaaataatagtcttctcctattatcaggcaaccttatcaacaaaattgacttctctgagcctttgtttctttatctaggtagctacctatttcacagggttattgtgtggctttgataagaaaagtactatgaacaattcaaggcactataggaatctagacattttaatagtggtcattataaatccgtagtatatctctttttgttcaaaaattgcagatggcagccaacgcaaccttctacattctccatgatctcactgcactctcatcaaccatgactttcaggcttttaaaacttgtcgttaccatagattcctctccctccaatcttgtcaattttgcctcagggtcacttcttgaatccagtatctttgtatgttcccaaggtcaatatttttgttcagcttttcatctactctcacctggactataaaaacaaccccttgtctagtattcctgtttccagatttttacttatttaaatttatcctatactctactgcaagagttatctttttaaaaatgcaagtatatcattgtcattctcagtaactctccattttcaatagggattatgacccgggtccctcatgtatcaatcagttcccatcaaaatctaccggacctaattccaggctaaatcctgcctttcccgctgtgtatcctttgcccccgccacttcagatctcatactattccacaaatatgccttttcatgattttgagcctatgctaggttatcctttccatgtagaatgttctcaatgtgacaggattgtgtaaagatagacacgaaagcatttgaagttgagaagtgatgcactataattgttattaatgttattgtacaaatcttaattccaaagatcttagcttgtgcatacaatgacaactaattttttttctaatacctatctgtaggattgtccaggaacagtgtagtatatcatttagccaccagaatgtaaaaatgttataaaatgaatggttttaaaactgaataactttggtaaaatagaaaattcagatagatttttgcctcatatctcttggaaattgcatataattgcacgtaatttgatattataaatttcaatttgtgaaaactagattctgaaatagtttaattagttaagaatggtataatgatattgtacttttccttttttataatccctttattccaaatggcctaaagccccttaataaacatttctgtgagagaaatgaatagagagcactttgtcttcagacttcaaagcaaggtcctagaaaatgaagaagatcctttactatgtgtatagagcgatgtgcaagcctcaattggatttccggggccagttccactaaaatttggtggtagatgaatggagtcagagataacaataatgcttttaaaaacattcattgagcagcttgcgtgtgctaggtgctttctcatttgaccctcagaacaatattaagacgtacatatttatattcctatttttttaatgtagaaaaaacgaaagtgaacaaagagcagggactcttccttggatactcagtcctgagtcagcagagtagggagtcatcctctcagtcacaaccatctactgaatgcctgtcatgctccagttcagtgctaggtggctggaatgtaaatcatgagtacatcagagaccctgctctacaagagtgaatgtctattgggttgacactcaagactgcctggatcctttgtcttccaacacactgaataaggcatgataaattgtaaaatatgatagacctgttattgttatttttattactattatgatctttttctctaacatctgccctgctattaatcctgatgagcttaactttcttgatcatcttctgtaataaagaagaaagtagatggaaagtagagagcttcctcctatcgttagacctttacacctggatgcctcgtctgagccccttttgtatgtcagcaccttggcagaagagagctataatctgaaatacctgtgctccagatcatatcttgtgtgtacttggcctacatgccattgacttttttttccaaagatttggttttcccaactgtttggacttccttgtggatttttgcattgagtctggacttaagttatataatctctgattttgatgtagaatgcattcttgggtaagagactacctcctccagtctaacccatgaaatcctaagaaggaagatttgagtgagtgaaagagagaatagcagaaagaaaaagaggcagggtaagactactctagctagacagtaagctccaggaggggagcctggttgtcttatttcctgctgaattccaagtacttaacacagcatctggtatccagtagcaatttaataaatatgtgttgatagactaaggcagggcaagaaaagccatggagatttcaggattaccaagtacttttcatagtcttagaagaaataccatgaaaatctcctccagaaaatgttaaaaaaagaaaaagatagatttggttagacaccaatccatgccatacacaacttgatctactgctatatcaagtgcccatgaattcttttaatatcagagagaccaattattaccaagtatgtgaagggttctttatctgtacttaaaataaagaagaatatagacttacagtgaaaaaaagatgttggatagcttcccagtagagaggttgtgaaaccttgtaacattttatggaggaagcttctgtcagacttactcttgaaaaggagaaaaactcaaactaaaatgtcttacttgcagaaaattagagctatgtcatgtgagaattagtgccaatctggagggcaggccaagttggctatgttaaaacaaaaggactccaacttggtagtctttttcatgtacgtatcatttattggattttactcaaatgagttggctagctaaaacagattttcacagacagtttatctctaactgtactctggaaggataatgtttataatttgtgtaagattatttgaattcagggaggtgatctgttgagcagagcattcccaaatttcttcactggacattgcgagttttcttttgaccaatggaaggcaaaaatgaaattttgcattaattcattttttatacagccatcatatatttcagagatcttactaccatatgttctatgctaagtttctcaggcaaaaacagaccaaaacatggtttctaccctccagaagcaagtagtctagaaaaagagattctcaaataaacaaatatcagctcattctgagacaaatctctgtttgattcatggaagagagtgattgtaagactgttttcattaccagaggctgtagaaaaaagacaattaacatttagaattaatattatgagatattttcagtgtttcaaatgaaaaccagtgttccttcaagctaacaaaattcccacctaggaatgtttttcacgtcactcaaatccaatgttgagttattatctctagactttccagtatcctctcataactctcaaataataattaaaaataacttcttagtgtcagtcctgtggcctagtggttaagttcagcacactccacttcagtgccctgggtttggttcccaggtgcacacctataccactcattggcagccatgctgtggcagtggcccacatacaaaataaagaaagtttgacacagatgttaactcagggcaaatcttcctcaagcaaaaagcagaagattggcaacagatgttagctcagggtgaattttccttggtaaaaaatgaaataacttctcaacaccatcaatgacagcaataatatttataaagcatctcctatatgctaagcactgtgcttggtattttccaaatactacctcaaattgccacagcaaacctacacaatgagcactaatcttcgttgaaaaacagaaactcaaagagattgtatataatctgtaaagtcttagatctcaaaagtatcagtgacagaattcaaattccaacttacttggagtgtgctcgcgctgcactggtctgttttgccttttcagagtctgcaagtttcttatagacttgcttcctccttttcttcttttatgccctgctctgatgtagtccctctgtaaccctcctgtgtgtcgtattaatttgctagggctgcataacaaaatatcacagattgggtggcttaaacaacagaaaatattgtctcacagttctagaggaggggaatccaagatcaaggtgtcaccagtgttagttccttctgagaactgagggaaggatctgtcccagttctctctccttggtttattgatggacatcttctccctctctgttcatattatctttcctctatgtacgtctctgtgtccaaatttctccttttgataaggacacaagtcgtgttggattagggcccaccctaatgagtttattttaacttgatttcctctataaaggctctgttttcaaaaaaggtcacactctgagctagtggagtctaggactttgacatttgaatttgagagccatggagaatagatacaattcagcccataaaacgtgcattctgaaatctggaaactaatatttcttcctttaacccatctatcttgggtactgctatcagagtgaacattctaaaccacaaatctaatcacagcttgcctctctttaaaattttcaagagctcctcattgctagcagctgagatctaaattacaggcgtggcagataaaggatttcacaataaggtctgtaagtcattttccaccttcatcacccatcactcctctgtcacagactgtgcaaatacctggtaagggaatagagcttttcattttccaaatgttttcttattatgtcatgttacctgaaaatgaattttatggtgtaattttagccagtttttagagctgaatctactgagacacagagaagtgatgcttctcccgtgattgttcttcttcctcaggatcagtcacatggccgattacaccaaagatccgatagggcttgccatttacctctattaaaatatttggaagtatttttcaatttttctttctcaccaaactgtgatttcttgccataccttctcaccagtgcttggcaaagtgcctggaatataataggcactcaataaatgtatgttgaattgaaataaatcaagtgttctgacaatcaaaccattaaatattttgtaacaacatcaatgacgatgttgcctaggtatgattggaaagacaaatcttttgttttctatccaaggaagactagccttgagctaacatctgttgccaatcttcctctatttttgcttgcggaagattagccctaagctaacaagacagatcttttttgattcattcattctttgtcagacatgattctaagtgttaaagctgagcaataagagcgacccacaaaataccctctctcttggagctggtatgctggtggaggagagagtcaaaataaacaagtaaacaaaagaaaagcataattttagatagaaataagtgttcagaagaaaacacaccaagacaatgtgataaagaatggtttggaggcagggaggagaatatagctctagaataatgtccaggaaggcttctttaaggaaaagagacataaatagaaagaagaaatgagctgctcactgatttgaaagcagattgttccagagagaagtaagagatgtgatgctctgtgtcggcagtgtagatagagcacccaataacttgaaagagtgctaaggaccagggtataaaagaaggagggattgatgcaagagaacttttaacaataaacagggtttatgattattttctcaagagcagtggaaagccactgaaagagttagattgaatttggggtgagggtgggatttaatcagatttaggtttccaacgtaatctactcagccctgagatgtcatcataggcggtccttagatgctttcccaacatcccaatcctattattttcattcttattctgtctcagaaactccatttcctttctttcaggacactctctcatttgtggttatagaaacattaaggtgaataagtcacccactcctatagactgcaagcttcctgaaggcaggactaggtctggttttgctcaccattgcattctaaggtgaggcatagtttgtcacagaaggtacttgatggacatttcttaaaacaatgaggagaaatttgaagaactatacgtatgccccctctagagtaaagagttgaagcaaaagtccttcaataaatataaatgataacgtaagacggccaattgcagaagaaccaaaaaaaaagaaaaagaagagaagggacgggaacataaagttggctggggttaagcaaaaacagtttagcttaggacattagagaagctaatcacatcaaatgttattaggaaaaggttagtcctttacagattggcttaactgttgcctcaggacagtcaagactcaaaacaaatagctttgataggtgaacagccatgctttctgtgagcaagacgttgccccaggggttgggggagcagggagaaattttaaactagatatctatttagctaacaagacataaagtgcatctagaacatgctgtaattataagtagtattatttctgattttttgagtggatgctaagggctaccaattaaaatgaacgtctaaaatctcttgaattcatctattcatggaaaattcattttccctcccccaccgttctcttttctattttataatactactatttttcccctgggttgcacacagagatcatatatttttttctctgttagtaaatccaatgaaaatctcatgagagaaatgggcaacatcactattattttacaggatgaactgagtgtaccatgacaatcaagaaaaaggtaaacacttctaaaaagccattctgaggtcatttagacaagaaatgttagtggagtcagagaagagagttctttagggtaggaataaccaagagagccttgagggaggggagaggacactatgagagaggtggttttgagcggagatggacagagctgactctgctatgactacaaagcaacttgatggatggtggggattgggggacattgaaaattgaactcattcattctttccctaaactatctccatcaagaatgaactcaataatatgtatttgggggcatagcaagtttttttttccccttttctagccatacgatgaaagaatccaaaaggggatattgaaaaattcagtttgaaaagagttttcagctccaatatgtctagagaattttttttctggcattaaagaaacattcactctcattcattccttgcaattttaaactacaggaaaacactttatcatgcttctgtgtgaagaagacaagatgagagcaatgttggcactgacaagtctgtgctaaagattgtatctaaaaatcgcaaaatatttgcttcttccctggctagtagattaaatactattctgtttcaaatccattatatatgtgtatgtgtggtatatacacttgcattatacatatttatgtatgtatgcattttttctctgttctatattagacaacatcaaatcctttattgaacaaagaggaaaattcactatttcccagagtagcttgaagctaatttaagtgaattgcaattttttaaaaacctactgactctatacatattttcttcatgtttcagaaagaaaattaatttgttgaattaattgacatattttaatatgctgtctgtaaagcttaaataaataaaaatttctcctttagttctttttgactaatctgaaatatatatctcaaagcaaatattttcattgttttaattttctttctggaactcatcttccctaaaaataagtaatggaccattcccttatcttgctttttcactccttctgagtagatctgagggtggacttcaaaaagcatcatttatggcttggttgcaagggctggagtaaaggacaagaactgaactcagttaaacagataaacatttgcattgagaataaacatttgttgttactttacaaatacatgtcatgctggaagattataaactgatgagtaaaacagtcatttggagagagaaaactacaagacagggaataccagctatcgtagaaattttttttcttcctagactcttactgaaagatgtgtaagcagtccttgagggatccaaggttccaggacttctcagggaatcagtgtctctgagagctttctattagttcccagagactctagcaaagaggcaggtttctttatttctgtggtcacataggaatgcatttcttagaagaagcagattgcaacatgcttaatatgtcatccaaccaactaggctggtcactgtcttgaccatttctatactattttgctgaagatattaccagactgctttagggctgtgactctgaagagggacagtgtgactccaattagaccctgggaccagtcatttggaaacaacaaagatctaagtgcctacagtaatagagagtatgctacaaggctgaagagacatagctgctaataataataataattaataacagacgtaatgttacaattgccttaataataatagtatatttattacgtgcttatcgaatgcctggccttttttcaagtgctttgcagaattaattcagataatcctcacaacaaactatgagcgaggtatattattgtcagcattctatccgtgaggaaactgaggtgcactggcattaagtaactcgcccacgatcattcagctagagagaaattttaagaagagcactgtctctacagcccagctgcttaccccctccactaaagtgtctgtaattacaaggtgcagttggaataattgggaaaggagtgctgggaggggccttgggagttaggaaggtttgtgtagagaagttagtagttaagccgagtttgttcttcaattgagatataattcgtgtattataaatttcacaattttaaaatgtactattcagtgattttttagtatataacagggttgtgcagtcattaccactagctaactccagaatattttcatcaccctaaaaactaaccccatacccattaacagtcatttcccattgtcctcttctctcagctcctggtacccactaatttactttctgtcattatggatttgcctattctgcacatttcgcataaatgaaatcatacaataggtggcattttgtgaatggcttctttgaattagtgtgatgttttcaagatccattcacgttgtagcatgtatcactacttcatttcttttaaggctgaataatattccattgtatgaatttatcacacattgtatgaatttaccaaccatttgtcagttgatagacattttggttttttccactttttggttattatgaataatactgctatgaacattcatgtacaagtctttgtgtgaacatatgttttcaattctcttgggtatatacctaggattgaaattgctgggccatctggtaactctatgtttaactttttgagggacttctaaactgttttccaaagtggcttcaccattttacattcccaccagcagtaatgagggtttcaatatctccacatcttccccagcaaccattattgtccacccttttgattaaagctatgttagtgggtataaaatactgtctcattttggtttttacttgcatttacctaatgattaatgattttgagcatcttttttatgtgcctactggccatttgtatatcttctttggataaatgcctattcaaatccctttcccatttttttaattaggttatttgtctttttgtcgttgagatgtaagagttttttatacgttttggatactagatccttagcagatacatgatgtacaaaaatattctcccattgtgtgggttgtcttttcactttcttgacaatgtcctttgaaatacaaaagatttttattttgatggtgctcaatttatttgttttttctatggttgcttgtgctttaggtattatatataagaaatctaattcaaggtgaggaagatttatacctatattttcttctaagcatttcatcactttagctctgacttttaggttttcgaccattttgagttaatttttgcatatgatgtgagttatgggtccaaaatcattcttttgtgtatggctattccgttgtcccaggaccgcttgttgaaaagattattctttttctgttgaattgtcttggcatccttgtaaaaaaatcagttgaacataaatgcgtggatttatttctggactcttgcttctattccatttatctatatgtctgtcctcaggatagtaccacacaaccttgattcctatagctttataaagtggtgaaatcaagaagcatgtcttccaactttgttcttatttttcaagatatttttaggtattctgggtccctcacatttccatttgaattttctgattagcttatcaacactatatgtaaaaaagccagctggtattttgatagggattacaataaatctgcagatcaatttggagatgttatgtcttaaaaatactgtcttccaatccaggaacaagggatatcatttcagctttttgggtcttctttaatttctttcaacagtgtttcatagttttcaatgtaaaagtttctcacttcttttcttaaactcatttctaagcatgatattctttttgattctgtaaatggaactgtttatttaatttatttttgaagtgttcattgctattgtagagaaagacaattgaattttgtatattgatcttgtatattgcaaccttgctgaactcatttgttagctcaaattgtcttttggtgaattccttcatattttctatatacaaaactatgtctcctgaaaatagagacagttttacttctttctttctagtatgaaataatctcagctttgaaacgcatgtaggacttaacctggagaataggcagaggaataattctaattacaatcccaggaatgtaaaataatctgccttcttgtaatcagagggccagattatgaaggccctactttggggaagtgtgtggcagaagatgagacttagtaaccaaggggaaaaattagagaggaccttattatcaagcagagtactgaggaggcactgatgcattgtgatctgggttaggatatggttagattattgctttagtaaattcaatctggcgtccacatggacaattaattgcaggtaaaagtcatctataataatatccagttttctgacttctgcaactggagggataatagagtcattcgcaaatctgtgtaataggcttataaacttgtttataaatacttgaaatgaaaaaatgttgggatttactttccaagtcaaagaagactgggaatccaataagtgaaggccatttctacactgatttatttttaatagagaaaaggaaaagtcttaagagcaaagcctcggttaatcactgccaccctaggtcattaaggtgtcaagaggatagcagaacaatgcgattcagcctcactgcactcatcttttaaaatgagtcatatcagaaaacagcagagttgtgaactgttaccagaaatttaccaacccttctctcctttgtacatgatcttttaaagctaattttacacatcccaaggcagaagacatagtcaactaaataaaaccaacatacttctgctcacacatttttgggttccttctattctataaaatttttaagacaaaagtgcttggctcttgtaaaatgaaccatggaatttgaacaccatgagcagagttagtgctgtaagcaaacaaaatttacattacagttaactggacacttatttaatactattcagaatggtcattatgcaacacttcaaccgaggtcataaaatgaggtcgtttccataaacaaaaataatttgtaattttcagagtcatacaagccatttctttgttagtaacaggaaagggtaaccccatgagaaatcgacagaaaacgcctgctacaacaaatccggattcctgtttcactccttatcctaatctacctggtgtggctttctcttaaactagaagtataatttacagtctcattttttctttttttgaggaatagttttcattgtgaggtttccagattaagaattcagatactgcttattcaattctccaggaaaaaaaaaaaaaatcaaattctcagctaaagtgggaggcaaggcttcccttagtaaccaagtgcaaaaactgaccctgaaagcaatgttgcacccagaagtgtctgagccaggcaagaggctcaagacaaggactagaacaactgtgtcttcagcccaatgtcatcagattgctttccaaacagcaagactaggggagctttattggagaggtagggtcagaagagatgcttacgttgggataaagaattgtgcttggatattgataacccaggtaagatactgcaagttgtagtgaatcagaggctactgttagatcacgagcttctggaggagaggaccagggagatgttacattttggcagttgggaaaaaaagtaaaaagtttttgcctgaaattttctttaggctgttctgcttcattttttctttgaaacctagattatagtcacgattcctgtcagacttagtcaatatcttactttcctaaccccggcacagtgttaaaggagggtaggctgaagaggaggaagaaatgaactggacattgtgaggtaaatcttcatgaaaagtgatgatgttagaaagtgactagttttacttgaccatatgctgttgaccgaaggtgtacatgatgatcagaggccccctgctcttaatgtacacacacttacatgcatgtgcgtactttctctctctctgaatggaaaattagtcttttaggggctaagtttactactctaaagtgaagtaaaccggtgaggaaaatccaagtcaattaaaaaggaagaaaaacatgattataacaaaatactagaaaaagaaacccaacagtttctggatacccatgggattaggtaagaataatgtattggttaggaatatttggaggttacagttattaaaaagctgcctagtggctgcacgatcttccacccacccatgaaaacaacaaaatagacattggaagcgtctctgtgccccagttgtatcacctcaacagtcatgaatggaaagatgacaaggaaaattatattaacttttttcaatctttctagtggaagtaggtaaggggaaagaagattgagatagctaagtgtaaatatggccaaaccaatgtgtcctaagtaacagaatgactgagggggacgtgggagcatgtttgtttctagctttcacgggtcccatgctccctactgggagtatttattgaactgttctgtgtggttgtacataagcaacttagtggaaaattgtgtgtgtattacaaaatctcaagctgctgggatagtgagccaagggtgatatgcatagctaatttaatcattatgtggatgcccaataatgggaggattataggctaaatgacaaggactatacatttcctgtaagtagttttccttaaaaataaatagcaacctatgaaaaacagtaaagaaagtagagaaacacaaaagtaaaataaacaaaaaaaataaaaagtcccacaatcccaaggtaaccactagtaacattttggtgtatgtttctccagtctattctatgagcaaactatttgtagcctactttttcactcagcaacagatctagatcatttttcccatgccaatatctataattctataacacaatatttaatggctgtgtatcattattgtcatctggagttaccattattaattcacccagtgcctgattgtggacaagaggttgtttctacttgccaattctcacaatttgctgtggttaaagttagcccaataacaacaatatctaatatttatagctatttactaagtaatagacactatgccaagcactttatattaattatatcatttgagctctcaaagaacgaaattaggcaaatactattattatccttgctctacttatgaggatactgagccttagtagcttaagtaactggcccaagaaacacacctctctgcgcccgacatatgtttgttaagagttctacgaatgacagctgttataattacgatcacctctgctcaggaagagaagtatcaggaaaaacttcaccgaggagatgtcgctagaacccggtgacaactgcaaaattaccccaacctgttctctgctcaaaaggcagaatataaatggcccaatataaatcttaaccgatccatttgagaggaagtctcaccagctttacaagtgaatcttagagggcagctttgaactatgtgaggaaacaaacctaaatcaactttcagcgtgatgaataggctgggaagactgtaatgacaagaggtagcattcaaactattagactttcagaaagcatgacgagaggactccgagtagagataagggaacagttatatctaatttggttaattacattaatactctgtagtaggtgcttagggatacgacaaaaatgcatggtattttagatcagaaacctcttttatcagaacaagttgttatgagaaaatatccttgaagaactagcttaaaaataatgatggtttgatatcaacccatttgttcaaggaaatatgattttttaaaactccttaaatactaacaacttctgaacccacttgttcaaggaaatacgattttttaaaattccttaaatactaataacttcacaaagagaaaagccaaagtaaataatcagtcatctcccttaattatcaaactaccaagctctcaaattcccaatgaagatatttttaaataaattacgtatttcctatctgactttattaatagccgagtttactcagcaaaactatgtctgttagcaacatcatcatggttatatataatatacaataatgtttttagtttttaatctgtttctgtatttattttgtttgaattttcatagtcaataatcacaggaggtaggtagattatctatgtacattttacatagatttaaggagacctgtgtagtaacttagccaaagttgcaaatctagtgatcaacagagctagacttaggacttcctaatttttaatcaaaattcttagtctactatattttaattgactgcaaaaatcatattatagattctttctatttttgactttttctacagtggtaacagtggtttataatgttatacaaatttcaggtgtacttcgttatgtatttcggtttctgtgtagattacaacatggtcaccacccaaagactaattaccatccatcaccacatgtgcctaagcaaccctttcaccttcctccctcccacttcccctcaggtaaccaccaatccaatttgtgtttctatgtgtttgtttatcattggttttatcttctacttatgagtgacatcgtacagtatttgactttctccctctgacttatttcacttagcataataccctcaaggtccaccacgttgtcacaaatggcctgatttcatcatttcttatggctgagtagtattccattatgtatgtataccacatcttctttatccatacatcccttgaagggcacctaggttgctgccaagtcttggctattgtgaataatactgcgatgaacataagggtccatatatctttacgcattcatgttttcatgttctttgataaacacccagcagtggaatagatggatcatatggtagatctatttttaattttttgaggaatctccttactgttttccatagttgctgccagtttgcactcccactagcagtgtatgagagttcccttctttccacatcctctccaacacttattgtttcctgtcttgttaactttagccattctgacaggagtgaggtgatatttaattgtagttttgattttcatttatagttagtgatgttgaacatcttttcatgtgcctgttgtccatcagtgtatctgctttggagaaatctgttcagatctcttccccattttttgattgagttgttagtttttttgttgttgagatgtatgagctcttcatatattttggatattaaccccttatcagatatatggtttgcaaatatcttctcccagttgttagattgtctttttgtttagttgatggtttcctttgctgtatagacgttttattttgatgtggtcccatttgtttattttttctattgtttcccttgcccagttagacatggtacttgaaagtattctgctaagaccgatgtttaagagagactgcctatgttttcttctagaagtttcatggttccaggttttaccctcaagtctttaatccattttgagttaatttttgtgtccggtgtaagatagtggtctactttcattctttcgcatgtggctatccacttttcccaacatcatttattgaagagacttttctttctccattgtatgttcttggctcctttgtcgaaaattagttgtcaatagatgtgtgggctctcaatgttgttccatttatctgtgtgtctgttttgtgccagagccatgctgttttggtcactatacctttgtattatatatctttttttaaatcagggagtctcatacctccagcttttttctttttcctcagagttcctttggccacttggggtcttttgttcttccatataaattttaggatcctttttctatttctgtggaaaatgttatgggaatgttgacagggattgtgttgaatctgtagattgctttaggaagtacgcacattttaactacgctaattcttccagtccaagagcacggagtatcttcccatttctttgtgtcttcttcaatttctttcaaaaacgttttatagtttttggtgtacaaatctttcacttgttttggtaagtttattcctagatattataaatggggttgtattcttaatttctctttctgttatttcgttgttagtgtatagaaatacaactgattcttgtatgttgattttgtatcctgcaacttgaccgtattcatttattattactaaaaaatatttagtggattttttagggtttaccaaatataaaagcatgtcatctgcaaatagtgacagtttcacttcttttccaatttggatcccttttatttctttttcttgcctgaatgctatggccaagacttccaatattatgttaaataagagtggtaaaaatgggcatccttgtctggttcctattcttagtgagatagctttcagtttttctccattgagaataatattagctgtgggtttgtcatagatgactttcttatgttgagatagtttccttctatacccatattgttcacaatttttatcataaaaggatgctgtaccttatcaaatgctttctctgcatctatcgagatgatcttgagatttttattcttcattttgttaatgtgatgtatcacattgattgatttgtggatgctgaaccattcctgcattcctggaataaatctcacttgatcatgatgaatgatctttttaatgtattgatgtattcaatttgctagtattttgttgaggatttttgcattgatgttcatcagtaatattggcctgtaattttctttttttgtgttgtccttgtctggtttttgtatcagggtaatgttggcttcatagaatgagtaaggaagcctgccctcctcttcaattctttggaagagtttgagaaggataagtatgaagtcttctttgactgtttggtagaattcactagggaagccatttgatcctggacttttattttttgggaggtttttgattactgtttcaatcttcttactggtctattcaaattctctacttcttcttgattcagttttggaaagttgtaggattctaagaatttatccatttcttctagattatccaatttattggagtatagctttttgtaatattctctcataattttttctacttctgaggtgtctgctgtgatttctcctctttcatttctgattttatttatttgatccttgtctctttttttcttggtgagtgtagctaaaggtttgtcaattttatttatcttttctaagaaccaattcttgattttattgaccttttcttttgtttttttagtctctatttcctttatttctgctctgatttctattatttccttccttctggtggttttgggctttgtttcttcttctttttccagttcctttaggtgcactgttagattgtttatttgggagttttcttgtttgttgaggtaaacctgtattgctatgacattccttcttagaactgttttcgctgtatcccatagatttcagcatgttgtattttcattttcatttgtctccaggtatttttttatttcttctttgacttcttcattgacccaatcatttttcagtagcattgtgtttaatcaccacatatttgtgggttttctgattttctttctgtagtcaatttctagtttcatacttttgtggtcagaaaagatgcttgatattatttcaatcttcttaaatttattgagacttgttttgtggcctaatatgtgatcaatcctggagaattttccatgtgatttgaaaagactgcgtgttctgtgggttttggatcgaatgttctatatatacatctgctaagtccatctggtctaacgtgtcatttaaggccactgtttccttattgatcttctgcctaggtgacctattcattggtgtaagtggcacattaaagtcctctactattattgtgttactatctattcctccttttatgtcttttaataattgctttatatatttaggtgctcctatgttgagtgcatagatatttacaagtgttatatcgtcttgttggattgttccctttaccattatgtagtgcctttctttgtctcttgctacagtttttgttttacagtctatttttaatgatataagtgttgctaccccagctttcttttccgtaccatttgcatggagtatctttttccatctcttcactctcagtttgctaatgtctttaggtctgaagtgtgtctcttgtatgcagcatatatatgggtcttgttattttatccaattgaccaccctctgccttttgattggagcatttagtccatcaacatttaaagtagctattgataaatatgtatttattgccattttgttactctttttctggatgttttagaagttcttctctgtccctttcttctcttgctctggctttctttagtattatgcttgggctcctttctggtaattatttgtgtatttatcataggtttctggtttgtgattaccaggaggttcatatataataatgtacctatatagcaatccatattgagttgatggtctcttcactttgacctctttctaaaaactctactcttttactcctctcctcccacattttatgttttttatatcatatctaacctcttattttgtgtcgttgtatccattaccctcttatcattgaaacaggtgatttcaggacttttgccttttgaccttcatattgtcttcataggtggttgatctgctaactcttctgtatttttgcctttaccagtgattttattgctccccccttttttaagattggcacctgagctaacatctgttaccaatcttgttttttccttcttcttcttcttctctccaaaaatccccagcacatagttgtatattttagttgtaggtccttctggttatgctgtgtgggacactgcctcagcatggcttgatgagcagtgctaggtctgtgcacaggatctgaactggcaaaatcctgggctcccaaagcagatcacgtgaacttaaccacttggccatggaccagccccgccattttttttcttttgataatttgtgtattcttatttgtggtcttctccatcccacttaaataagtccctttagaatttcttgtaaaactggtttcttggtgataaactcctttaatttttgcttgtctgggaaacctttatctctctttccattctgaatgaaaggattcttttaatttgcataatgccataataaatcacttcagttctaacctgtgttaacagcataatgaacctcaagggtgaagttattccttttatggtgctgggactttgttatatttgtgtatctttgaaataaatgggtccttactggctcttcatgatttctgaggtatcataatttccttgcttaccagggactacaaacatatactcattaaatcaaatgagtattactgtgtgggagaaactcttctaggcactaaagattcagcaaaaaccaaatcagatcaataggttttcgtggagcttccaaagctgaactcaatatcccaaacctcacaaattttacttgtccttcacctttctctctctgcattgaatggttcttccccattcctcccacacactcagtctagaaacatttaaaaatctattcttctccttcatcccatggacccatgaaatttcactattgtatgcaatagtagagatctaaagctggaatgaaaagatgtgtaggtttcctacaggtgagatgtcagatgggaagctaaagagatttagggtatattgactgtaaagtgaaaaatatgtttagaagatataaaatagctctatgagaatataattgggacatttgaagaagggaggctgaaaagtgggtagggtctaaatactgaatgaccttgaatgccatattaagcaatttggactttatttggtagggaatgggaagctttgactgctctcttttgtatttcttggccacactcagaagtatgtgttgcctgaattagtgaatgaatctgagctttttatgttggaattatgctttagaaaaactgggctcagggaagcatgagacatagatgagtctgggtaaccagttacaatatgattgtaataatccagtcaagagggagtaagggaatgactgggaagggacaacatggaccttcagatgaccagaaaaacattaacactttctatttaccaccacctcagtggataatattgaagaacagccctcataatcactttaatttcccagttgataatcattttcccctcagcaatcagcaaacatttattgaaatctccctgttatgagctgaattgtgtctcctataaaattcatatgatgaagccctaatcctagttcctcagaatgtgactgtacttggagatgaggtgttttaagagatgattaagttaagatgaggtcactagggtaaggccttaacctaatatgattggtgtctttataagaagaggaagggacaacaaggattctggagcacagaggaaaggccatgtaaggacagagcaaaaggatttctgcaacccaaggagagagtctcagaaaaacacaaacctgctgataccttgaccttggacttccagcctccagaattgtgagaaaatgaatttctgttgtttaagccacacagtctgtagtattttgttacagcagccctagcaagctaatacaccacttatttgtagaacaccacttatattgtttcatttcagaaaagggaacattcgtacttttaaattctaataacatcatctgatgtcatagagttctactgagaagtgccatccttaaaccccttcttccaaacaaccactactactgctactactactactactactactactactactactgctactactaccacttctccttctccttcttcttctccttcctctcctcctcctcttgctctttcttctccttcttgttctttttctcctttccttcttcttttcctcttcctcctcctcgtgtccctcctcctccctgtccttttcctcctcctccctcttcttcttcccaaaacaccttctgattctgtctctctattactaagtcctcagatgactaatgacaaacgagactagaattacagccttatagatttgtttagacagaaaggaaatttaatttcaagcaagtgttcttgcatgaaattcataaattttaaaatgttattgatatttaagatcatattagtagttgaacattttctaatcaggatgtaggggaaaaaacagttaagacttaattaaacaagttctttgttaaggactctccaatcaagggtgctagaaaaatagatgagctatttcaatgctgtgcattagctaggtgtgctgtgaattaattttaaaaacttataataaagtttttctttgctatatttaagcgcttacctttacaaaaataacatggaaaccagagtgtagtttaatgatttttgttcagaaaattctagacagcctctgaattgtcaatgtataattaacaaatagttccaatatgaagactttgacacctataagactttgctagggtttcaaataatgtataattttaaaccaatgttaccaaatcaataacgccctataaaatcaagcttttgtgaaaactttctcttcatttttgaatcttaactctgggtgaacagcttgactatgggagcagagagttattctactagagaagggtaatgtgtcacatacagaaatgtcaaaagttctaaatttagttgattcaattcaccactcactttttactcttagggctaaagaatgatgaaattctaactgagaagaaaattagctcagtggggaaatgtgatcctttaaaatactacttccataaatttttggcaaactgagagtagcccatcaaggagagccaggcaccacctgctgtgtttgatttaaaattgataatctaatagagtgggactgcctggactgcctcagagcagagaggggttgatgacagtctgctcgaagtaattggctcaggcaattaaaggtattgccagtttgtcatgagttttctagataagttccaggcttttctttatttagctcccctatgttgattaatgagaagccacataccttcagtgtgtctcaggtagtgattgcataaaggtctgtttaaagatatcccctccacatagcacttacctcttactgaccagttagtgcatgatgcaccagacactaggcaagtgattgttaaggaccctgggcctggcaatagattacaaagtgttcaagtcttggttctaccacttaccaactgagtgacccaggcagacctcttaatatgtctctagatctcagtgtcctcatgtatagattggggtgatgataacgtcttcctcatacagtcattgtgaagactaaatgagttattgcatggaaagttcacaggagaatagctggcacacagcactaataaattgttgtttttgataatagacttacataatccttaataatcctatgaatcattatgaccctccataggtttttattaagtgcctcctatgagccagacaatacagatgcaatgagagcaaaatggttatggactactgctctcatggagcttgaggtctggagagaaagacaaacaaaagaaaggggggagagttttgccccattataagctcccttgttcagatcataggttctaggcaagatgccacttttatgatcactctctctgcctactatgataaattaagagttaaaagtaaataaaagacagcactggacaaaacaattttagcttacaaatttttaaggtgatgaaaattgagttaaaactagaaataaacaaaaactaaattgaaatgagagcaatttaagcaagtaaaatcgttctcttaacaagaagagtaaatataaggtgaaaataacaaatattgacgacacacaagctataaaaactgaacaaaggataaaataatgaaacaaaactttaaaaataaaatgaaatatgttgaagaatgataagaaaccagaccaaagaaagaaactcaaataaagcaataaaaggataaaatgaaacttgatatgatatgataaaacataaacaatctatcattaaaaaataacccaaagacaaaatacataataaaatctcaaggaggttaaagatagaaattaattttaaaagatttacaaaaatagagaaagatgtttcaaatttagctaagaaggaagccacaagtgaaagaggatgaagaagaaaatatgtgtcaactaatttacgataatttgaagatgactcaactctttaacaacatggagacatacatgtttaaagattggttctgctttacttaatttttttaaagtaaccattttccatttgaaaatggaaattgtatctttggagacttggaaatagtctgtggcctataattttttacttgcatctttaaagtccatgataaagaaaaaaggttacttccctttcctttgtccagtgaaagcaggatgtcctacaccaggaggaagccaccactgcgctgttgtggaacgagcaaccctggcagaggatgacggccacctttaaatctctgccatggctctcatcacctctgtttccatttgccctgtggaaatcagcagggatttggaagtgtcaaatcaagtaatggtgcaaaagaaagatcaatagaaagacatggggttgctgttcagtaggaaaagcaagaagaatgaagacactccacttaagtttccttttggttgttcacttcattgtatgcctttggcagtttgcagtgttttcacatccttactctcaacctgtctttaaggatttgctagctctataaagaataatgattccatgtccaggaatagcatatgggtgttagcctcatagaattttaccctagcggtttatgacatctcattttaagttgcacaccacacgtattgaggctagagaattctttctatatgagaaacaatagcacaatattaactaataataactcatctctgagaagcacattttcataaagcattttccatgtttcttgtctcattcagattaaaagtcgggtcttcatactgcctttacacataccaaagacaacacagccagttaatttattctcaatttctttctttaaaataccccaatgcaccagcaggagggagcctggggactgaatggaggaccccatggctccttgtgtgcagctaaccctgcgataatcagctccttttcctagaactcaatttctacagcttccctgtggcttccatcaccccagcacagacaacccctcctctatcctcttttctccagacctttggagaagagaatttatctgagcttcttctcattgtccaacagattttaaggataatttttaaaaccttaacaaacctcagaagggccagacttgcaggtcccaaaaagcgagaactcaagtcacccccttaactaatactgttggcctctgaatcagagtgtggacaaaaatgaataattcctgagatgaaagtttagcaaacgtgttaagaattccttctgggatgattcactggaagctcaacaatgaccttgtgccactcggcagaatttcataaatcaatttgagttaacatgaactgagtgtctatgatagcattcaaaagactgaccttatgaagacccaagagaattctttaaaagtttttctttttctttcttggtaagctagacagctaaagtaaatctctgttacttatcattcttaaaatcatactgcatcttccccatgtgccacctctaagtactaatttcacttgaccttcacaacaacctcatgaggtctgtattcttattatcctcacttccagatgaggaatggaaacttgaagagttaagaagtgttcccaaagtcacacattaaatgggaaaatcatgattcagtctataatcttaatctatagtatattgatatcatcggcgcccttaatatttgaatttgattacatttttagaagattcatacattggcagtttattcttaatgataatgccctctacttacccccattcatatcgaattgagctaagattcccaaggcagagggattccagatgactactgtggcatgatgtaaatggtgctttcaacaatttaatgtgcatacaaatcacctgaggatcttattaaaatgcaaattctggttcagtggcttaggggtgggtccagagattctgcatttctaacaagctcccagataaggatgatggtctgagtaccacattttaagaagcaagaacataaaggaaaacagtaacccagtgtaggaggacttggaatagtctccactagaccacagttgagctgtatattttcaaagcttccaaaattttctcattagtaaaatatggactataatatcaaatatgcttatctcataggactgttttgatgatccaattgaatagtgccttgtaaagtgctccaaaaaaaggcatttgttactattgtcattaacatgaagttcaaacttgttcagttcaatgtcccccggaagcctacatgaaccttagatatgtcttggctataaaaacatttatcagagaaactgtcccgctcgattgcatgaatatgtgatcctaaagtcacgttgaattcaatcgctttactcatccagagaataagataggattcagaattttccttactcaggaagccattttcacaagcttctatgagaacaatattactttttctctgtaagaatatcatatctcaatttcataactctgggctgtttctttttgtcattcaagagtgttttcacagcactgttctatcagactattaaagtttgttgataatgctgggttccttactagcatcacctcttcttgccctcccaactgccattaaccagtagcctaacattaagggacaccaggtaagggttggctctgcaagttttcaaagctccactttctgaaggcccttgtttccaagcgacagataggtttgccaggatctggcttttcagattgtcccaatgaaatgctaattgtttttggaaaccttgacaaagtcatgatttattcattataaaggagactccccttcgcttttggaattcaaccaacattgattcattcatttaacaaatatatattgaacagtcaatgctaggcattgttcttgtgctaaggagacagagatgaatggaacatgaatagtctatacatggccttagtattcagacagaccaggttcctatacacagtccattggtttttaggcttctgatcttggccaaactaaaacattcctgatttcagtttcttccttgataaatgatatttgtgaagcttgtataagacagtatttataaagtgcctgtcacaatgtttactgatagcggatttctaaaatacgatggctttggtttcctaaggggcactatattccatttcacggagatctggaagagccagagcatctgacggattcaacacagcgcaaggagttctgaaagaggtaggcacagacagggtcagcctctggagggaagtgattttttttctgaattatttcactttttatctcttggaagttcactttccctctgataaagcctaagtccctgggaagagaaagcatcaaggagcgttaatgagaaaatagacatttgtagaattcagttgagtgatgctaggattttcaaggttaaaattttattcccattgtgtttagaatgaagcctggatggtgtgaattacagagagattgtgttttatttgaagaacatgttcttgacaacctcaagtaatttaaggttttaactggatgttttcataaggctaacaaggatggccaatgtttctgtcataaactttaaaggatatcgccttaaagcaatatcctaaacagctcaccgttcattcagtctaccagctttgaagttatgaaatgcttgaccaatgtaacaaaaattaagtattgctttactttcacctttgcacatagtgtgagactttacgacttatagtcctatttcaaatttacgtgcaaaatgtgacttcactttatgtaactcaaaagaattctcttaggcaacatttttgatgtggtcaagacagttacttataaaaagatatcagacagcatctatcaaattggcatgaaattaattttcttcatcaggacatagcccctcagctgttatgataaattttaacatcagattttcctggctcagtttctaataaatagaagcagcagacacagctacctgttttgaagggcaatatttcatattgtgtgtcagcctaaagcattagttactaaaaatcaaattagcaggaagagctattcatatccatcttagggacagtgaattgctgtccttgatttttctgtagtgctggtagagaatttaggattaaagtattagggatctttccaactacactgtttaattgaatatgacttattctgaaccaagattgatataatttgtggacactatcgtgactagtaactattgatcatttcaatggacttgagctggaaatctgctgttatattctgtcctaattgctgagaaggtgcaaacatcttttctgcattaagagagatataggagaagtgacctaaaatctctgagatattaggttctttttgtacaaaatagtgaacatatccagcttgcaaagttgtcataagaaaaagtgataacatgttttaaatgcctagtatactgcctagcatgtagtaggtgcaaaataattggtagtcacattgagatatttcttttttatataaagatcaatgaacatcaaccactccccataggtcacatttatttatccaacgtattttttattgagaaactactatgttccagacactgaagcactgggtattgggcaatgaaaacacaaaaataccttccctcaatgaatttattatccaatggagataagcaggcaataaacatgtaacttaataaggtgcattgcatattaatagtgacaagctatggatagggctaccaaaggtcctgctgtacttgggaggtcacagtttaggccaattgtcctggtgtcattattaatagtgtcccttttcattctcactggtgttctgtggttaactgtattagtttcctggggctgccataacaaaagactgggtgccttaaacaacagaaatttgttttctcacagttcaggaggctggaagtccaagatcaaagtgccagcagggtcggtttctcctaaggcctctctccttggcttggagatgactattttctcactgtgtcctcacacggcctttccttcctgccctcttgtctctcccctctctccttacaaggacattagtcagatcggattagagcacatcctaatggcctcattttaacttaattgcctctttaaaggcctgtctccaaacagtcacattctgatgcactggggattagggcttcatgagaggaattggggggggcacaattaagcccatgacataaaccaagctgtaggataaaataaagtaggaaagaggaatagggagtggttggatgagggtccagttttaaaaaggatggtcagaggaggcctcactgagatgctaatgttggagcaaagatctgaaggagggagaggagtgaccttgaagatatttgagataagacatttcaggtgcagagcccagtaggtggcaaggacagaatgagaagagtgaaacaggaaatagacagacgagtttcagtgggagaattgtgctcactttttaggccattgtaattaggttattaatctcagtgatatggaaaaccatctcatattcaatatatatgtggttaattaatctgaaacaaaaatgggcagatccttacttaaaatttagttctttgcgaatgcttaccctcaacagagatttaccttaccttaactgcagaatatagaacgtggcaactccacacaggtagaaatccactcagttgtagtgtctagtggattaatttacctgggatgaatatgcttggtagcaatttgcaaaaactgccagtactattataaaggtttcataagtacagcatcagatgttagattttgagggacactgcatatgagagtgttctatgtaaagcagacgaggtaaacgtggtcatggtgtagtttaattttttctagcgtctttgcaaatgtgttaattgatgcctgtgttagtttcctagggattctgtaaaacattgccacaaactgggtggcttaaagcaacagaaattttttctcccacaatttaagagagcagaagtctgaaattaaggtattagcatggttcgttccttctgatggctccgagagagaatctgcttcctgcttgtctcctagtttctggtttttgctggcaatcactggcattccttggcttgcagctacatcactccagtctctgcctctatcctcgcaaggtcttcttccttctgtgaatgtgagtgtatacacactcacagtatgtatgtgtgtgtcctctctctgaggtgcagtgtgaatatgaatttttgagagacactattcaacccagtatcatgcctatgtagaaagaactagaggtcagtttgtattaccaaaactacgaaactacagttcttaggaaaatctgtctggctttggattgacccggaacagaacaatcgttctcaagtttgtcttcacatttgagctactgattcatttggtctgaattgattggagtggctaatatttttaagccaatctggtgattctaatgagaagccagggccaatcaactgatattcatggaattgtaaacacttgagcttcatttcatatcttatttgattttcttcccaagtgcctagcacaagatctgccatataatatacttaataaatatttattggttagattaatgaacaagtaattttactgaataaattcattgttgaaagatgaagattgaataccaaaatggagaggaaagtagtgtttcacgttggaagttatagtggattatatgttatttcttctagcatttgaaggattttgcagaaacaattacttcattcatctcctaacttccttgagattagtaagtgtcacatattattatccccatttttcagatgaagaaattggatctcctagtgcagctttctcctcagctgcattattattttttaatatcatcaggaatttgacggatgtcccacagaaaatggaattagaggcaatatttctagcagagaaacataggtcccaagtcttcggtactatattcaggatagggtgatttaagaaacctaactggggggacggggaaggaaataaaaaccactccacaaagtgaaacaaatatctaattttttagacacatccaataaatgaagcagtttaattatttattaaagccattattagtgtagtatagaaatcagaatgtcagacccaggagttagacagatggatatgtgttcatatcctggtactgccgcttataagctgcactcatctctctaccaaaatttcctccgctgtaatgtggccatcacaatattatctgcctcaggggcttcttgtgaaggttaaatgccataatgcttgaaaagtatttggcacatagaaagttcttcttgttattgttgttgttagagcattacgttttaggcattatttatctccatctttccttagggcgagatcatgttcaagtgaaatttagaggactttcctgttttattgtttaattttgtgttcatattcaccttccctgttattagactaaaaatgtcacgagagcagaaactaggttttcttttgcctgcgcctagtaggtgcacaatgaatattccttaaataaagctaagttagattacatcactctttcgctcaaaaatcattcaaaagtaaaagctattctaagtaaaagctacagttcttataatggactgtgagactctcagattttattcctcaagaagctgaatagaaggaacaaaaggaaagtagctttttatttttgaaaagtcctattgagtatgttataaaaggttagtagtcaggtgactggccaatcataaaatgaacagagtagcctaggccatacgaaaattaatgtggacagggcagtggagggacagaaagattcattatgtaataaagactctttttgacaagaaaatgaacttaataatcccaaatcttattaaaactcaattcataaattatattcatggtttcttgtcatcagaagaataaacttcattcagttgtaatgagctttctggttttaatacgtgattgacttattccagagaaaaatttgaagtcacaaagcttgatcactaaaaagtactaaaatatagaaacacaaatatcatagattatttgtgttagcttgaagaaaaggaatagcgcaacaggatttaggtttaattcatatttatagtaaaattattattaaagaggtaacactcaatatagagatttgggtgtggggatgcagacgctttaatttctgtcatatcaaaagatactgctgtcaattttgaaatattcctttttgcctgaagtgctgaaccttaaacacatttctcccagcatctctggggaggagaacattatctagccaggagctgcgtatgtggaaactaatttgaacctcctaacctctcaagacagagtaaagactgacattattattcttcttcatgatacaagtgagatcaaagcagctcggtgaggttcagtcctttttccaaagtctcgcaaacaaaaagtagcagagcttagattcaaaccagttctttctgattccaacgctgcaagtctttccattacaagtgttacagttaatatgccccaaattacttacatttttttttatattggtaagaatacttaacatgagatccacccccttagcaaagttttaagtgcacaatacggtattgttaactacaggcaccatattttggaacagaacaacataatgagcttacttgtctcgtgtgagtgaaacttcataccagttgaacaacatctccccattttcccctaccaccagcccctggcaaccaccattctattctctatgaatgtgactgtgttagatacttcatataagtggaagtatttgtccttctgtgactggcttatctcatttagcctaatgccctgaagtttcatccatgttgttacatgtagctggatttctttcttttttaaagctggataattttccattgtatgcaaatacttacaattgggctctctatttcatctttcctactaattatggctattttttaaacatcatttttaaaatgaagttgcacaatttacattatttacagtgtaatgaaatgaccatttagtaaatgactgtacattactctgtggggacagaccattctaattgctgacatagcatgaccatataatttaccacctacaccagaacatttttggacacaaaaagggtactaacagagagaatgtttggacaactgtcatgaactagcactgtcctgggcaaaccaggagggcctgtcactgtactaatatatagggaattccagataatttcccagctcccacacaaaacataccaccgtataagcacttgtggcaatttgtgcagaggagcaaaggaaaattgggctcagtgatgaatcttagaggatcccaaagaatactgatgctttttcgtgttcttgtattctgctagtattctctggcaagttctgccaacagagcagggctgtgatgtcggcaatcgcaagcacttagtacaggtttggaaagcattgtagctttcgaccatctagccatttacttaacagttgcctgcagcaacttacaaaaattatcctggactcagccaactaaagctctccctaaatgtttcatgaggcacatcatcaacacaaaggtaaagatgatcaaacgggaccctgccttggttgaaagagagagtgagtcacaggcagagagagagagacagagatagaaagagcagagaaagataaaggcgagatacaaacagagacctagaaggacaaagagagacatggagccagagaaacacagagagggagagggagacagagagacaaggaactgacaaagagtccagaagaaagtgagagagagctagggaagacagacagaggcagagagagacgtaggagagagagcaggaggctgacagacagattagcattcatgttatgagaaacaggtgtcttcaagtagcagctctaagtagagttcaatttactccatttgcatttagattctgtacattatttccagcaaattcaagcaccttctggctccctccttctgaattaactgatagataaagaaggtaactgttttacaatcaggcaaaagaaaacaggtcaattaagaaggtcagtgttctgcctccaaaattcataaacttccaaaattaaatgtagatatttttccctcattttcagtcactaactctgctgctacccttcttaaaggtgaacaattacaatcgtgggctgactgcaggatccaataacatttagtatggtttggcaagcattttcagcaagaattatcaccagagtatgaaccccaaattatctgggtccctgtttttttaggaaagaatttgaaaatactaaatgatctgtgaatgtatgcatttatgagccataaacctatttaaaaaatagacatgccagtgataaatccacatttgtaactgctgaagaatgtgcttcctagccccagcatcaagtcactgctcatgaatcagcttgtcaatgattcaaaggagacacagatggcatcacagtgccactgaaactcctggtgattttgtcatcgttactgattcatgggaagacactatgtctgtggaaacattattagccattttcctccaccagacatcaacaggcttaggatctaggaagaaaaacattgtccataattcaaaagcacaagatagaagctgaacggggttgtgaattacagagcaggagccttttttcccatgctaagccatggaaaatattcatttttgctatcagctatactacaaaaatgagggaaataagcataattctcattatagtgaaattaccacttctgtagccatcatcattactcgttgaattcataattcatggcccatcactcaccactgaaacctgacatttacatataatggcatttacataacaggaaaaagcagccaatgaaaaatgaccacttgcatgtaccactattaaaatctggagggtcagaaatatggagcaactaacatgatgatgggctgatttgttttcagtaatgtgagtctttgtaagatgaaacttttccccctggtaaaaatgaatacattttcattcagttatatcacagtttaaagtggcctatttgtctgcacatttactttttattctctttttgtgttgcttttttccatgatttttgaaatgctagtacaccagaagtttggtttaacttctacatgcagggataagggagttgacaattttgatttctaaggcaataaatttgtaactagatcattggactcagtggtttatatagtcaattagtttaagatattaatctgtccattgtaggtaccaacaaatattaaataacttaataagattaattattcaacaaatatgttagtgtctaaatgtgtaatacactttactagttgctaataatcaaattagggtaagaaacatttttatttcattagatatttttgctcaaatataattccagtgaagccttccctggccagcatatttaaaattacaaatcttcctcatccctcttcccaacctgtccaccaacagaagtctctagacttcatccctgctttctatctgataaattgtttatttttgcttattttttttttcttccttgactataatgtaagatcaattaaagtagaaatttctgtctggcttgttcacttcattattcccagcacctgggatagtacctagcacattgtaggaattcaacaaatcgtgttggaataaatgaattaatgaatgaacagaatcctcccctcaaggaattcggagtttagtgagagaatgagaaatcaattatgcaatgtaatagctgttgtgatagatggttagatcccggagagcagggacttttcttgtatgaccactgtgcatccacagttctacagcaaatattgtttaaaatgtttgtaatgtatgcatcataataagtactttttgaaataaatgaataaataaatatttctgtgatgtaaggtacttaatctatcaaagagtgtttagtgtttatgggggtaaaacggcctctgtactaaggcactccgctggttaacctacctttcccatcgcttttcttttgctgtcattggctgaagaatgcagtcagcatcatccttggccgagtgcctgcactcgcatctgtccatttagagtatgaggaggggactgcctcacacactgtgagaaaatagaccatgcagatcctaaattcatctgctaattttacggacacgcagctattctgtacatcctgagaccatcatataagatacacagtctgatttcatgctttcagtagacgttgattgagccctttttgtacatcaggcactgtgcaaggtaatggggatggagtagtgaataaggaggatttggtttctgattctgtgatgtggttgagtataggtcgactgtcttattatgtatgctctatgcttctctattcctctgtcctaacttctttggggtaaattaaatattttcagtattccatctgaatttttcaattgaatttttgactgcacgttctgttgttatttttccttgtttcccagcatctagagattgtaatatgtctccttcacttcttcagacaactggagttaatattgtaccactttgtggaaaatgtgcagcagtgaaattcattcaccttcctcctccttgatgctattactgtcagaaactttatatctacagatgtaataaactgcataatacttttgttttaaacaaaagaaatacagagaaatccaggtaatattttgtatttattcacatatttttgatttccagtgctaagtttccatatcatgtcatttcctttcagcctgaagacattcctttagtctttcttgtaatataggtctaatagctattatttcccttagatttggcttgtctgaaactatctttatctcaccttcattctcaaaaaactgttttcactgcatgtagaattctgggttgaaagtctttatatttcccccagcacttattccatttttttctggcctctatagtttctgatgagaaatcattctcatattattgttcttctatatgtaatatgtccttttattctaggatttttttttaaagatttttcacatttctttgcagcaatttgactgtgatgagtctttacatgattcctcctgtatttatcttgattgtggtgccacaagtttcttggattttgtgatcttggatcttacattgacgtttgtaaacacattcagaatatttaggcttttttttttttttttcacattttcctctcccatctcacctggttctctaattacattcacgttagactacttgatattgtctcacaaattgctaaggatctgtttaatttttaatccctttcctttctattattcagattggatgatttgtctcttttcatgtctaatcaagctcataactctttcttcagtagtccctaatcttctttagcagatctaaagcagttttttcactttaggtattttactcttcattctagaattttcatctggttcatttctgtagttttaatttcactgctaaaatttttcacctatttacttattatgaccctctttatctttaaagtcattttctgctaattccaaaatctgtgtcatcctagagtctgtttctattgactgcttttgaaaaaatcttgattatgggtcacatttttctgctccacatgtctgctgatttttgatggcatgatgggtgttattgtaatacattgtagggagtttggattatatcatcttcctttaaagtgtgttcagtggctggcccagtggtgcagtggttaagtgcacacattctgctttggtggcctggggtttgccagttcagatcccaggtgcggacaaggcaccgcttgtcaagccatgctgtggtaggtgtcccacatataaagtagaggaagatgggcacggatgttagctcagggccagtctttctcaaaaataaaagaaaaagtgttaatcatgtacaatttatatttaaatatatccctaaaagagactttaaactgtttgagaaccaagatattttagtataaatcctttgttttacaaagaaaagtcagagacccaaagaagtttaataaccagttcaaagtcactcaacttaaaatagtaataagacaaggactaaaatctgagacttctaactcctgattgaaaacagcaacctgtctaccttgtagaaccaagagcagttcaaaagatgctccagggaagaacatcattaactgccaaattggggatgggggcagagagtgtaacattaatacctgtaagggctgggaagcaggaagctcctcccccacactcaggcctgagggtccaggaagctgtcatagagaaagtgagcttagcagatatcagaatttaagggaaaagaggaaatcaagcaactggcaaatatttcttgagtgtctgtgacaagccagttttgggggtgactgtagagtttggctagacattgcaaaatcaaatctgaagcacaagagctgggtgagagggaaaactaaagtctctctccgactacagggggctggtggaaccttctctctctaattccttgtcagaataggatctcgctctacagtaggctgtgatgcaggaacaatagagaaggtacagcagaggatgggagaggtctctcttccctccaggagggttggagatacacagggaaagtctaccagaagcaagtgtgtttgaattgaattttaaagcccacatgggcttgtagaagttgatacttggtgaagggccaccagactgtggttacaatggcatggagacttgaaatggcatgaagaaggagaagcagaatgttcggcttgggaagctaaagcaaaatcctaatgtcccggagaagcttacaaaggagacagcacttagatgggtgtgtccctctagaaatgtagacgttaactaaagagtcagttttatgtaaatcagatttatcttataagtttaaaagcttacttagatactaatctaggaaatgaaatcaggtcttcttttggtattaaaagtgaatttataccttcatttgttagacatttattgatcttcttttatatccccggtcatcaaccagcatttgagatatcaggtaaacaagacagttcatgtcacataagtgttaagggcagaggaaggacctgttttgtgagttccaacaaatgcaagagggtggccaatgtgtggccaatgggtgatgattcattagggacaacagggagagtggtggaaaatgctgtcagagtgaggcagggccagatcattcagggattggggtccgtggtaggaagtgtgatatttttcaaaggtcaacacgaaggttttagagggcagggaaatgatctgatttgatttatgtatctgctagttcacttcatcccctacacaagagatctctgggggtttttagccagtggacgcatggtggggaaatagatcggtagccttgtgatcaggtctctttataatcccaaggtaggaactataaagtagaaaagcaacaagtgatacatttgccaagtccacgttataaagatggtctaacttcgatttaaattggttctcttcttattgctttacattcgacatcttccaaactgatttgggggaggcaatatacctatatatcaacatgcaaatttaggcttctgggcactcagagtgggtaaggtgatgctgagttggacatttgttgttcctgacaccaacagttgtttcaagtgtttgctgcttgcccacccacccactattgattttccttgactcctccccgatgatctgaagtcacacatactgctcagtctattccagggttaacattttgtgaacacacctcacttttttggaattattctgcttgaatagttccatccattaatgtccacatgtggcaaatgtggaggattgtcgcatctctgggcatgtcagcttatgctaatgaaactgcctgtcaaggacgtctatttttccactttcagggaaggcaaaggtactagcaggtgattgcggtgtgaatgatttatgcgatcatctatctcctctgtaatcaaatgtgaggagcaacgagagcagaaaattgtcatgtgggcccttaactctggtttgaatattgaaatttcaattcagttaactctttcaatgatatttgcattactcctgacctaaggccaaaaaaagccaccaaattttagttttactactcaaaagacctatttgtgtgattatttccacttgctaatcacatctttaatgcaacataaggaaaaggtttgtaaagaaaacctaaaatatgagaaaaacagagggaaaaaaaaagatttattttttttccttctgggatcccaacacacggcctgcgattgcccgagcagatgggtgcatccagatcctgcctggccggcttcctctgataaaccatgcaacacgccctagtttctctctacaaacagcattaacagaaccgattgcatatcttctaggtttcctctacgctcagaaccccaccaagcgcagcattaaagagcggctcatgaagctcttgccctgctcagctgccaaaacgtcgtctcctgctgttcaaagcaagtttgatttttttccccccaaactgtttgctttgtttgtttaaggtctgcatgcattgcagttctccgcttctaaaaagaatcaatatagtacattctgcaaaaccacctctattgatgtactcgtgcttacctaaatacccaggggaacttttgcgcaattatgaggcacttcccgtttggcagactgatagcacagtgttagtgacaaggagccggggcttcaaaacatttggaaatttttgtttgatctcaggcctagactcagataactcttgggattccattgcctaacttgttagcagagcagctgtacactttaaagtgtactaccttgtaaatttcttaactcacatatgtgcatttggtgtgtaatttagatactgctaaacttcagaaatatcactaggttagaaaaactactacaaagtggaaaacatgtatgcagatgtcacttttcttctttgtcgactttctccctgtatcagtcagggttctctaggaaaacagaacaaatacatacatacatatacgtatacatatacatacatacacatacacacaaacatatatataaagggatttattttaaggaattgggtcacatgactctggaggctggtatgtctgaaattcacagggcagactgtcaggctgaaaactcagacaagattcaatacttcaggggctggccccgtggccgagtggttaagctcgcgcgctccgctgcaggcggcccagtgtttcgttggttagaatcctgggcgcggacatggcactgctcatcaaaccacggtgaggcggcgtcccacgtgccacaactagaaggacccacaacgaagaatatacaactatgtactggggggctttggggagaaaaaggaaaaaaataaaatctttaaaaaaaaataaaagattcaatgcttcagtcttgaggcagaattccttctgctaggaaatctcagtttgcctaaggcttttccatgttggatgaggtccacccacactgtccagggtaatctcctttacttaaagtcagctaatagactaaccatcacactttcaatcttctatttctctccagttttgtggcattcttaaggagtagaaagtagaggatatctagaggggaaaccttttatttattttgtgaaaatgccatatataatttatggccaacatttataaatattctgtgtttaagaacatgctttcataccaattgttttcaagcatcacacaactgttagaatcaggtagagaaggtgctgttctttgccagtgaggaaccagaatacgaagaagctaggagaaaacttccaggtgtggggccataacccatatcttcacctgctcttcttatatgctgccacactattttgtaggaactgatggactcaattagtgacttaaaaatgtgaatgggggctggtccagtggcatagccgttaagttctcgtgctctgctttggtggcctggagttcaccggtttggatccgggtgtggacttacgcaccacttatcaagccatgctatggcaagcctcccacgtataaagtagaggaagatgggcacagatgttagctcagggccaatcttcctaagctaaaaaagggggattggcagcagatgttagctcaaggctaatccttctaaaaaacaaaacaaataaaaatgtgaatgtcctgaaatttcactagtctccacaacacaagtggagaaaataaagaaagtacctcaaacaacccaatacatccagtcaaaagttccaggataaaatagcaatttattgcagtggcactgaccagatgtaatatatcataataataaggtttaaataattcacttattcattcaatataaagttattatatgtcagttcctgttcctgttctgagaaatagagcagtaaataaacagctttttaaagccctgtcctactggaagattctgtggggagaggggaggggccaggacaaaattacttttattagtaataatgctacatacaaaaacatttaaattatggttgagatacattgctctgactttttcccttcattgcgcacacatgcacaccatctcgcaaatcaaacacagcatgtcaccagcagcccaggccatgatccggaataatgccaaagccctaaccctccacaatattgaagctgcagacatttttattgccactatttgtcagtaaatgttggttattagagccattgcttttctccattcaagtttgaatcaaaattgccagtttaccagatatttaccaaaaacaaatagtcatttgtataaagtagacaggtaaactgtaactttcaaatggatctctacattcacttaaggaagaacaaggttgtcatgcctgttagcactcttccttccccagtatctgataaagccgtataccaaacagatgttcacagaggatgcaatttttgactaagtgtgagggaaaagtcaggatgtttcttgaaaggaaaaaaataataataaaagatattaaaaaaaggagcagaatgattctaaaaactgatatttttataaaagtgggatttcataaaactggctgataatgaacccatactaggcttggactatgatttgtggacctaagaaggtctacagatataaaactccctcccccactagccactaccttccccattgaccatccaacacaaaacctcggcatggagaagtagattattggaaaggaaagcacattaattccaccgttgtagtagaaaagtgtttcgttagatctctatccatgatctaggccctacgtagttggacacaggactgaaaaagatgatatgagaacttgaggcaagaggcgggtggttacagccgggtaccagagtgacagaggaccctaggccaccaggaggaaatgcatgggcaccaaatgtccgcctgctggaccgcagagaaccctgaggtgaggtttggtttgaccaggctggttctagccttcgatgacctgcatggggttgagggaatcttctccaccagatgccatgcagcttcacagctagagggctgaaagatagtttaacaaagggccaacactcattctaaattccatcttcttttttcaggaaggcagataagaaagggctcttcattttttatggcaggagtgtgaaatttatcaatattatgcaaataacaaaaggaaaatatttcctgcagaaaagcccaaactcctgctgaactatggagcacctagataaccaatcagagaaccttagagtgtgaagggaccataggcagacacgtaccttcacctcatatctagatcccagaccaattccttctgtcaacaccaggactgtcataagaatagaagctttactggaaatattcaaggatagactgaagggcaatttcaggagtttggctcataggagggtacactggactagatagtgtctaagcaaaacttcatcatattttaaacactataagtattataggttattataataatagcttttaaatggaatacagcctattttatgtatgaggaaactgagatctagagaagggaaatgatttgctcaaaattacagagctatttaaaaaagaatctgggatgaggggctggccccgtggccgagtggttaagtttgcacgctccgctgcaggcggcccagtgtttcgttggttcgaatcctgggtgcggacatggcactgctcatcagaccacgctgaggcagcgtcccacatgccacaactagaagaacccacaatgaagaatatacaactatgtaccgggggactttggggagaaaaaggaaaaaaataaaatctttaaaaaaaaaaaaaaagaatctgggatgaaaaacttgactccaagcccagtgctttccaacactgaatttctatgatttggtatcagtcggggtccaggcaggaaacataaggcacacttacatggggcaatggatggggtttaatgaagagattgtttgcaaaggtgttggcagggtttctggacccaacaaggctagtgaagcactaagtgctggcaagagtgaaagttatcatttctagactgacagtttccagaagatgaagaaaggcagagcagtagctagaactatcagagagggactctgttcacaacagggactctggcccttggaagaggaatgcagccactatcaacccaacttccaccaaggagggagccaaaagaataaataccacaacctctctcttttcctctgctccaatcgcctgatggggtttcccattggccaaacccaataggaagccgaagggcaaggagttcagataatatacacagaggccagcctcccggagcacacagcatgtagaaggctcaggaggacacatggagatgtttgccagattctgtacatcttcgcagctaggagttggggatctataggaccagcgacaattctgagagtcagtcacactgctcttcttcttattcccaattccaagacatcttggaggttgacaactggctcaaaaatgtatttaatattctgtcgataattataggattaaagaacttaactaattatttcatggatggcttagtatcaagaaattcctagctactatgctctatgtgagcacaaatactttaaaaaaaaataaatgctgtcaactctgtggctatatttccccattgtataactctgagtaattcactttatcattctatgctccagttatttttttctaaagtaatcattttccctatttactcaaaagacattatggtgacaaaaagttacttactagatagtaatcaggaactaatgcaaaagacaaaatatgaaatgtttggttataggtgtttatacttatatgcatgtttttatttaaattagcttcataataacatccacctggtaaaccttggtgccctcattcaatcaaaataattgattcactaagttaaagcttctttccaggggtttttgttgttgatttgagtagacacaggagagcgaacatgactaggtaatcgtgaggctagactactcatatccaataagcctccaccagcatatcaccttgtataatcgcaaaacataatttcctaacttccagtttttagtatcacatccagcataacatttcagtataatttgttttccctggtagtatattgatgatggaaagttttagatgcctctcttggcagagaaaccatcagcttttggctgttggaggatttgttttcaaaaagtgacttgaactgccaacatgctgccaattgtaaatacaacagtaacctccagaaaattctgtctaaaaatattaaactttccgacaattgattaatctcgtgctaactccttagtgacttcagctaaaggctctcacccgggagtatagtcaggaaaatctttgggggaagagaagcataacctacgagagtttgtaaacttaatttgcaagtagcaaccaaggtccttccgttttgtcatatgtatgagccctaaaaacattatattttaattctcaggtgttatttttacatatttaagaaacacctagcacttacgatgtggctgctacagttctaagtgctttgcacagtttaacttattatagcccaaaaataatcctataagatggactctattattcacactttacagaataggaaacagagggatgacaggttaattaacttgcctgaatcacatcgtcagtaagagatgtggggcagggggagaggtcaaccccagcaatggagctctagagtctttgtacttctctagttatgttcaatattttggtcagtttttaccaaaaaaacaaaaaaaaagacagagtctttctccacttacctgttcactttgggacactctttgcagcccgtattgttcagggagactgtggtagcccttgaatgagttgtttctcctctctcacctcagtctcaccatctacaaatgagcagcacagactgtgcctcaagtctccccctagatctagcattgtaggagccggcgagatggcatttcttattcctggctatgacaaatggtagatgtgtcaaagctagcatgaagtttcctcctttcattgtactttactacccatgagaagtaggaaatgggaaaagttggaaattcttcttaactcagatttaataccaattggcactatcaattacttgttgtaaactatgtgttttattaattagaatatttgtcccttctctttgtatggtcttttacatgttttaaaattctttcttttggttatttcatttcatcctcataaaactcctggcagaataacagatcacaagtctccatttagcaaactaagaaatggagagattaagtgtcttgcccaaagtcacataggtatttagtgacaaatggaaagaggggcattctttttcctggtccatcatgtatctaccaggagactccattaaatcatgaatgagtcttggtataggaaagacagaggcacgagtcctaggacagctgtttactgttggcaggtttagcagatttcacttcaacatggcagacatttatggtgcactaactatttgaaaagtaatagtgccaggaacaggggaatacacacatcactacctctgaaggctggcattgtgccggaataaacaaacatgtatatatatatatcactcggatataatgaatacaagtacaatcacgcgagagttaatactagaaaggtattaagtagttgaatgacaattctgggactagtctatctgattcaaatcctgattctgtgactaactagccatagaaagcttaggttagttgcttaccctctctgagcttccatttcttcatctgcaaggtggagataataatagtaaatattatatgttcactcgaagattaaatgagcatatgaagtgtttacaacagtgactggctagtaagtggttaataaatgttggctgctgatgctgttattactttattactactgtgatgatcacaactactatagtcatagagataagattgactcttacctgggtgtgtttcacaaagaggtattatttcagcaggaccctttggagaagaatcatcatttcgctggagggagaaaaaaagtaggagcattctaggtacttgaaaagatgacgcttaagacagttggaagtggtgagaagcaggaaagagaagcagctagaaaaggagagctgggaccagagtttgaaggtgcttgcagccaacacaaggctatactttactctgcagtgaagggaggcaatggggagtcatcgaggcttttatttatttatttcagctttattgagttgtaattgacatacaaaatcataagatatttaaattgtactttgtggtgatttgatatttttctatattgtgaaaggattctcccccatctagctaattaacacattcatcacctcacatatttatcttttttgtgtgtgtgagaacatttgtgttgtactctctcagcaaatttcaattacacaatacagcattatcaactatatcaccatatactacattagatcctcagaccttattcactttatagctgaaagtttatacactttgacaaaaatttccctgtttctcccatccgtcagcacctggaaacaacttttctattctctgtttctatgagtttgactttttttttaagattctacatataagtgataccatgcagtctttttctttctggctcatttcgcttatcatagtgtcctcaagatccatccatatagtcacaaatgacaggatttccttctttctcacgactgaataatattctatcatatatatatcacatcccacatcctctttatccattcatccattgatggacagttaggttgtttccacatcttggctattgtgaataatgctgcaatgaacataggagtgtagctatctcttcaatgtcctgttttcattttctttggatatatccccagaagtgggattgctggattaaaatagggagtgaatctttgtcttgattgggttttgagatggctaaagccagccaatagtagaaggaactggacacaagtcaaacttcagaagagttgatgatgaacttgaagtcagagaaaagactagcaaaggatcaagagcaacaattaaagacaagatgcagctagggtgtcaaaaccacaagcaaatgctaaattggacattgtttctgaataaaggacccatctgaaactgagaataagaaagtgacacaaaaataaatcaaaaaacaggcaaattattaagggtcaaaaaagaaaacaagaaaatcagttgggaaactgcttaaaacatctatgcaagaaacggtatcaacagctaagccttattgaacacagcactattctaagcctgaagaattattgcaaatatttactgcaaacctatgaggaaggcctaattataatccccacttagatgagaaaactaaacaaagaaattaaatcactaacccaagatctcacaattaccaagttgtcgggcagggatttgacctagaacaatgtaatgccgagtttcgggccttcaccactagacttttctgcctatgagagaagacaaaggcctaaatataaggtgatagtgacggaagggagagggtggatttgaaacacgtggtgaaggtgtattggaaacactgggaaacaattggtggtactgaatgaaagctaggaaagggacagagtgattccaccaaacggataatggtgacaataagcaagaataaggaacagagaagcccatgaaagcaggttaagaaaagatgacagtttcattttagacatgttggcttaaagtatcagaaaaacacaagctacttttgaaacaagctttattgttgattggtgtatcttgggtttttcttcaggttatctgtatgatgaaatcttttgcttctcacttgatttttccactattttccttactgttaatttgtgccaaaaggggtagactgatgactacttataagaagctacatagaagtttagatacacaaaagtctttcttcttttttttcttttattaactatttcatgattggtcactcatgcagtttctaataggagtcattcataaatatctattttccatttgcattgacctaagaagtactaatttgggctaaacatgagtgtagtcaatgccagcgtctgtagtttccttcagacactgaaatgagagcccaaacttcaagcggactcaattttacactccaccaggtccacaaaatacagagcgatgctctgttatctgcttagattgcagggttaaagtttaaccttcttactttcaaattgctttcttgccaggggatatagagcagcaagagtgatgagcagaaattctttaaggaaacactggcccatctttgcttgcaagctttcagaaaaaaaaaaagaagaagaagaacaaagacaagttctggacatgaagcaactgaggaaacattattcacctttcagcaaaacattctcatttgcgactttgggtagaaaagcaattccacagtacactgtcgtgttctctgaatctgcttaggggtaggcacatcctccagtgagtcttcctggaggtaataagaatcacatttgatttgtctcaatgacagtgtaaaattaattaatgttttaggtgagcaaatgttagaagagtttgtggcaaattatcacaataatagcagaaagcatgcatgtggattcctatgatgcaatatgcactatgcaaaatgctttatataccttattccatttaatcttcagagtaattgtccaagtgctattattatcttcactttacagatggggagactgaggatttgagattttaagtgacttgccccaaattgcatagctactaagtggctaagctgggacccaagcccaggtcatttagtcagttgacaaatcttcatcaatacctactacttggcaggcattatcctaggtgccaaggttgccaccatgaacaagccaaatatagatcccgtccacaaggagcttacagtctaacgggggagatggggcagaacctgtgcaataaatccccatgcctcatggctccatagctttcttcctgtgacctttctctcaggtcacattaaactctttttccacttggtgatgccacatgacattctatgatttttgccataactgccacattctggtcccatgaagatgaatttaggcactgttgttcgagaggcatgattatatccaagttgctcctggctgctaaagaaaaaaggactcaaagacagacaccacttttccatgaacaaacgttttaaaacatgcagaatatgtgaagaccattgtggaaactgtgtctgtgttcaatgaatgttaaatatatccatacagctcagttattttcatattgatgaacactaccatgagcaggaagctccgaaacatgttcccgggggcaatacctaccaccaaaagtaattcttaaaaactgggtaatttctggtatgatcttgttctgggcttgcctactctggaggccccaacactctctggcccttctaatacctttatgtattcttccattcaatagaagaattactattctctgtcaacatttactcccttaacgacgtcgttgagtttcatggtcttaaatttgacttatatggtgaggactctgacacttacaccttcagccaagactgtgcttatcaactccagacccatatatccatccactcagttgacagttccagttggatttcctattagtgactttccactagaatttaaggtcatcatgagcaaggattttgttttctttgttcatttcagtgtccacagtgccttgaacagtgcctggcccataataggcattcaataaatattgaatgaatgaatgaactgtctttaatgtccagaaccatgctaggccttagcagtaactagataactgagatacatctcttgtctccagaggttcacattacagaagaaatgacaggtattcaagcagatcaatgatatacaaagcaatcagagttgacagcacacagtacacatgctgcatgcgagtctgaggaggcctttcctctgtgaagccccatcccagtgagataagcattaaagagaatagagagagaaggttgaggaagaagaaaggcaaatccatgtagcacaaatagtggaagcaaaaggattaatggtgacaatgcaggcttgtccagggaatagcaaattgtccaggttattagatcataaggtgcatgggaggaaatgacaggcaatatagctgggtaattgcctcaaattccattccaaaaaatggtccttattctcttgccaataataaactggaagactataaaaggtcccaaaggaaactgtggtttccagtggatcccatgatcaataattgctcagttcagagtctctacaaaaagaaaccacagggtgcaatttttagggcaagggctttgatgactgatggaattactcttgctgtgtgtttttggacaagttattcaactaccttgtacgtcaatttagccatctaaaatggggaaaataatactcatcttaaaggactttttaataattaaatgagataataataattaatattttaaaaactatgtgccaggctctattttaaatgcttctgatacgttttttcactttgacctctcgacagtcctttgcagtaagtcccattattatccccctttgatggataaagaaactgtggcatagagagactaagcgccttgcccaaggtcgtatagccataagagtcagaaaagggattcaaactcaagaggtgtagtaacagagcgctcattcctgaagcgaggactagaacaatgcctcactagtctgtatgcagtaattactaataatcataatcattgccctttattgatcaattactatatgtcagtaattcaagcaatctttcaaaacaactgtataaaattgaaacaaatattatccttagcttggagatttctaaattgaggcttggagaggttaaacacattattcaatgtcagcaatgagaaatagacccagagaaaacaaaaatttggagcaactgaataatttgctaaaatgagtggtcccagacacagttctgcttatcgtgttaagagtgacactagacgttaccgtaatcagtacaaatactactacaaataataacactactgctatgattgagtacttaccctgtgccagacatgtgtaccatcttatttaatgcccacagtcaccttgtactataatatcaggtacaattttgtattcatttttatgcctttgaacatatgggagaattaaggcacagagaattttactaacttatcccagtcacaccataaatgtcccccggacatttggactaagcagtctaactttctctgaaccaagaaaccagcttaaacctagaagaaacatagcaaaacccagatgactgctcagttttcctaatactctgttttaaacacggcagtgatggataatgtgtggcagaatatgattaccatcactcatattaggtccaaaacgttcccctaatatgccaccaagaatttatcactaaacttacccaaattctttttaattccctaggtaatagattgcatctatttactatcgactttctaaagcaacacgcaacacagtaatgtcatgaatcgggcattgtattttgcctaaggaaaatttccaaatgcttattcctttacaatagattgtttaatgcagcattaacactcttttaaaaacgtatcacctgcacatcaccttctgaaataaagaaaatgggagaaaggcttttcctactgattaaagatttggtggctattttactgttatcattatttgctgtaatatgcacatgtgccttttcaactttatgttcccccctttgttctcaggtaattaggtgtcacttctagactttgcagtcggtaaacttgggtttaactcctgattccacggcttcctattactgggtctttcataagttacaacattcctcccaacagtgatttccttgtttgtaaaagcagggtgacattatctgtgcacagagtaatcatgatgtttagctacaataatgaaagtgaaaataattttgtttactacgaaaagccagccatcaaatgttagatattgtcactgtggcttgtgggctccttatagcttgtgccccatctcccccatgcccacctgcgtctgatgtggagtcagaagcttattaaaattgtgaacagagtgaggatggagacgctcttattaataaaagacattgtgacaggcattcagcaaagtgctggcctaggagtcaagatgatcaaggtcgaggctcagttcttccactgatgtgcccaacgccttgatttacgaccactaaagctaaggctctgatttgaataccatttacaaagtcaagaggctggattcaaggccactttcaattctaacatgactctattttctgctttgagccctttgctgctaattttctgattcttggttgggcatgtgatttctaggtaggtggggcattatcctccctcctttcctatggcaggcagaacaatacaatggttcattacatgaactctggaaccagactttctagagttcgtaccctggctttgctaccgtgtgaccgtgggcaagttacttaatttctctgtgtcagtgtcttcatctacagaacagaatatggcatccatagtgtgctgatggggactttaggagttaatatacataaagtgctcacacagagcaaaggctataaaaagtgttgtgctattattattcgatttttaggacaaacaggagaaagtctgtcaaagtttaagagaaacttttgttagggcatttttaatttagtgagctattacgtgctatccttctttatctctttccatgtttcactactttttaaattttctctttgatcatagtccctctcagctgttgcctttcctgactagaatttcaatcttttgggtctgccttcgtgtgtaagttcagtcacattccttgattccttcccccagcccagcatttttattgtagattttcctctctgtctataatgactggcaatataatttttatttccctcatttaccaaaaagcaagcaagaccctactagctgggaaataatagtgcctatcataaggaaccattcatgacttactgtagtaataacatggttaatgctaataataagccttccaattaggtgattatattttaaaatttaagcttgtgtgaaagagttatttatgtttataaataaggtagagacaatcgatccataagtgctgtgagaattagttctagcaattttcctctgtgtagttatattttataagtggttgaatacaatcatgaaattgcaaattcaagttctcctggaatggaaattgcaatgtcattgccaacgatcacctttaatagaagacgttcaaaatacttggctgttttcaaagtacttttcattttccatgtgatatatggatattaaataggataaagtactaattataaagggcttttttggtcctaatatgcttttagggccagagttaaagaaacacatatctgacacaaaaatttaggggttcagggtggtctgggaagtgctaggcccctgcagtctttccgatgggctgatttctttctactcgtggtctgtgcatgatcagcttggagttaattgctcatataccctccatgtgcacctgaagatagtttctggtgggcggatgggtgaatggttgtgaagaaaggaagagtcaagagggctcccaggccttcacattcttgagataaagcatttaaaattcaaaaagtttaaagagttgcttacaaggcctggcccaggtttgaactctccatctgaagaagtcaaattatagaaggaaaaagaaagacagatttctgtcagatcccatctcccctagttatcagtggtgcagctgtgcggggttgagcacattccttaacgtctgaaaatcagtttcctcaactggttataattctaaccccttgagcgttgtgaggggtggaactcaggaatggaatgcactgagtatatggcatcttatccgtgcccatacaagtttttaaagtagaaaagaagggaagaaagaaatcacctcacgttggtgccatcaaaaatagttttggaaatcttcccccaagcagctttatcttggccctgatgtatcagactaaaacattaaacaacaaataacatctcctccttattctagaagttttcaggagtagtttccaaagatacagtcaagaatcttgcagcattgggctggcccagtggtgcagcggttaagttagcacgttctgcttcagcatcccgggcttcgccgattcagatcctgggtgtggacctaagcacggcttttccagccattctgtggcaggcgtcccacatataaagtagaggaagatgggcatgggtgttagctcagggccagtcttccccagaaaaaaagaggaagattggcagcagatgttagctcagggctaatcttcctcaaaaaaaaaaagagaagaagaagaatcttcgagcattgcttagtgtgatgctaaaatctggagcaaaattagtcagattctcttccaatacctaccactggaccaagcttctaaatatttaataatatgcatcattagaaggtattcatcctcatcataatgttattgccatacggatcaagtcactattaaaccaatttcattaagagtaaacattaggagtaagggcgcaaagtatttttataaatgagataaagcaatataagtcaagttggctgaatctttggctagacaaatcaatttcagctcaaatagaattttaaaattatagtgtttatggatctttttataatgaaaaatggatacgttttttaaagaaaggtcatgctgtattgagaaatggacctcctgtagagatatccactatgcttgggatgcttcaaatagttattcattgatttcacattttttattgagcatttttagtatgccaaactagatgctgttgcaccaggctagccagtattctggcaggtcctgaggaaaagaatgtggcaacagccccacagtgttccctgctatgacaaggcaaggactcatctctgtgtgcccagcctgggttctgaacccacttctagaatggaataacattgttctttgtaaaatggttttatttcagcattacagaccttgtttacaaacaggtgtattaggaaggccggcctcgcactcatagttgtttgtaaagcaagacgttctgtagttaagttctggaggggatggtttgacctcggataaagtcaaatttgcataattacgagtccagctgtaataagcttctactggattttaagaaaagctgtgagaaaggggagaaagatgcctatttttaaaactcattctgttgttcccaagtgatttgaattccaatttctagcccaactgtgtcacagcttcaggggactgttgactcagacataggacagccttggccctgagacacttaaatctaacgaacaaagaacaaaaaggagacggccaggaagctcaaggctgtctaggtttgagaatttgttgtctgattaaaattaaatctgttagaagaaacataaattaaaataccaccctatttgtattcagcttgtctcaggatgcaaagcagccccagagtgagcaagtcagcaggactccgcattgtcttaccttggcagaggcccagagacgattcagaggccaggtgggctagagtcccacctggttctgcttttaagcccagacaaacctcttagcttccctgaccctaaatttctcagtggtaaaatgtgaaaaagcaaccctttggtgttctttccagctctgagatctcatggcttccgcatctttttctccgtgtttctaaatcagcacagcatccaccgccatcatagtgatcgtcttgaggcgccgggcacatctatccatggggcctgagtcacctcatgaatttcacagttctgtgcagattcatgctgtgctctccacagagtttgcctccaggaatcagtcttgattggcttaggtggtgttgcttttttaacttatcatatgctagtgattgctgatgatttcaggtgtgtttttagagcctgtcatcctcctagaaatagaaacagccctttggcaggtacgagtcattaagaagtaaggtacaagccagctgggaaaacaagagtcctcaggcagacacttcaagtgtggtgctttgaatattgcatgtgatgctcatcctatcacacacacgtaattcaattacactgaccctccagccctgcgtctctgtctcagtctcagcatctgcaagtatgagacagctggaggaagaagctatgttggtagtgtggttcagactgctgtgtggtcacaaaggctgagaagttaatgcgatgttttctttctttccaacagaaaggtcactaggtctggaggaggttatgctatgattgaaagactattcaggaaatctgattaaaatttcctctacttttgcctatgctgtgtttcttggaacaatacatagagaacacagtgattccaaagaaggcagttaaggtccaccaatgggccacaaacttcaatttgagaaataattttctagagggcagctgaggttcaagggactccaaaggaatggaaactttagcagcaacgtcatttgtttattgattcattcattcattcaccaaatacttattgagtgaccatgggatatcagaacctatgttaggtccagaggatatacatatctgtaagacattgctcctgtcttccaggagctcacaatggaaaagataaacatgaataaatcataatgtgttttacatgctacatgagaggtcaggtgtgagaactcttaccagggaactatcaaatctgcatggtggacagttaggaaaggcttcagagaggaggaagtgatatttgaactggatcataaaagagatatacatttcaacaggtggaaaacgaaaagggaaacattttaagctgaggaaattgtactgtaaatgattcaaaggaagcttacattggacatttttcaagaaagcagaacctttctatttgttactgtttacttacattaaatctgttccatgacatttatttccgcattggtaactacagtaactacaacacagctcgattcagtggatcaacagcaatcttagggagcaccatcttccttcattctctccagctctggacccactgagtagaatcaacacattcattccaatgaacgaaggagaaattgaaggagccccattttggctttttgattttccccacaaagcccaggctgttaatacttagctgcttttcttagctacttttagcgattttcacaacctttaggtgcaggccctgcttactttctcatcagttttattcttgtcagctcagagtgtattcttggccttcccatcccttcatatctcttctattattcttatccatccaccactattctgcggcttttccatatgacagttccaaaataaactattataatattaaaagtatgaaagaaacgtttggttttatctctgcttcctcactgtgacaaacacaaccgtcccaagtatttgtttcatcgccgttattggtcttttgtaaactccttgagggcagtgattaggacaggccaagaatagagttccactgaccttcttttccctattaagtgggagctctggcccctcactgtgctcagtgagacagggcaataagtaggtacagatattagtgaaaggcattattaaatatcaaaatgacgactgacaaatgagacattgaattgggagtactagtggtcctagggagagagttggtaagaagaagctgttctcctgaggctcacctctctgagttgggagcctatagccaagaggaaggaatgtgatggaggaaagccatagtttcagtactcggcctggatatttctgttcctcttgagttccttagctaaggcgtggaatagactatggcaggaagaattccttaggtctccattgggccctactgtgaagaagctgaacctaattaaggatgctggactttgagaccagaacacccaggtcctaatatatcctgacacctctcaacttgtgttatacatgacactagggcaaatatgcagatgttaccagatgttatctgtggggagaaagagttctatggacaaacaccctttgccgtcaacttggttaaacaaaaacggaattcttcgttgcaagttttctcaaagcctttatattctacttttttttcccaaactatgttaacatttacagcatttcccaaatctatatggaccccaaattctttttgcatagagcatctttcagaaactataatataaatataattcacaaaacaaagtaaaatattttagaatttacctgttgctatggactcccttgactgcaaaatagagtccagacagaagctccctgaggcccctgtccacccagtgtgcacccatgaagactgggtttatgccagtccaactggcagctgacgactttactcatttcagcacctgatatgactattttgtttgcagccccaggtgaaatattttatttcagtggaatcctcaaagagtattagcagagtcttatctcatagttatatgatacaagggtagtactaattattattaaactaaaattcaattttgtaactagtacttggtatatacacacaaatttcacattttaagcctgtttgtgattttttatacttttcaaactgtactggaaagatgctagtattataatatctaatgactagaaaatatgaaaaaatattgtgcagaattgttttagcttaatgctataaactctgggaagtgtaaagatagtgggagaatccttcccctgggaaaatcacagatatccaggaaacattttgttccattttcctgtgttgctgtgtgtaagctctagtgagcagtgactgttcttaagatgctttttgggtttcctccacagacagcgtggaagatgaactggagatggccaccgtcaggcatcggcctgaggcacttgagcttctggaagctcagagcaaatttaccaagaaggagctccagattctttacagaggatttaagaatgtaagagctttcttttttactttatcttcatactgttctcagaggagcattgagaagtgagagggaaagagggaaaatacaccatgctgtgagagccgcattatatgtacatttcataccagtcattcctagatgggagtattgtcagtatccacatggactttgattttctttggcacagctatgctcgtacaatggaggtgcacattaaacaaagatgagtatagcggaaaggtttactcaatttgatttttagttgggatcttttttctttttcagctataattatatcatttcaataagcttcaattttctcttcattttttaattatagtctggtgcttgacttgaaccttgactatagattgaggcccatccagaaactccatttctagcattggagaaaagtcactgtaagtctcataccttctaaaagaccacactgccaatgactctagaccacaggtgtctgtaggtagtccctgcgtccagttgtctgtgatctgagtgtgcatgtgatcctctctcctgagcgaatcatcttcaaaaggaatgatatcccatgtgcgccagagggtgcaggtgagagacaatgagtggcccaggcaatccatcaggcacacattctcactgaatacttgatatgtgctcagtattaagctagatactgcaggatgttcaaaagccagagaagagaggcttctgtcctcggggagactatcatctgaataaggagagaagacttgctgtcatgaatttatctgaaagcagtgcatccttagaagtgtcaaatggtcgtgcatcaaatggtacacgcagcccaacatgtgttatgttctcactcatatgtaaaccatagtagctacaggtaccccttggatccagactaaactgttttgatccctccccaaacctaccccctaacaggcccaattccatggcctgtagaagtctgtagtgtccaaatgtttctgtcaattccaacctcttcaaatctgaccacctcaaatgctacctttgtccaacctcacgcatcccagatgagaaactctgcctcttctatggtatccacaaaaaaatttactcagagagtttgcagtgctagttgacttttcagaatatttctacagggttccatcctgcgtattgcacacaaccttccaccaaatctctgactccatggagactgtccctattccatttccaatccttaccactctcctcgcctgggctttctaaatttttctctcctcattactcctccaaaacctggttctctgctaacacccaggcctttgtgggggtagcctgggtgggaaggggagagatataatggagatgggtgctcacccctcacaggcaggacactcattaaaaggaatcttgatatgtcatctttcaagatgacacatataataaacatacataaagagaaaggttctttgaaaattaggctacagaattattagttatgcgtatgctgcagccacttgcgggctgcagagagcaagcacttacaacgaaacagctgcaccgaccactgacaactgcaaaccactgagcagcgacgatggggaaggagaggaggtgaaaaagaccaagttttggccaaaagtaagtgctaaagcaaggctaatcacaggatcaaacttcaaaagtattcctggaacatcctcggatccaattcagagatcttgcaatacgcaaactttttcctccgtaagcgtggattgtgcagcatttccaaattggttgttgaataaaagggaacttaatccaagctctcagcatccccgcgttccttgactgctgctgtcttattactccactgccatcactctaggtctctccttttggggtctggctgcctttcatcccatttgttgcaaattgaaatcatgattactgccatcattaaccttcggagccagcatctctgcagcctatcttctctaagtggcacttcacaaaaaattgctcagtcgccgaagtctgcattcattgctttctttgcgttttttttctttgcctacctgtcctttttctgccttttctcctcttcactctcttttcccgacctcttttttttccttttcctactttctgatccattctctatttcttcattcctccattcctatcctcattttctaccttctttgtctcttctccttgtcccttcttgtctcctttctttcacctcttcccccttctttcctctttctctgtattttttttctctccattgttttttctgtcccctcccacccttccccatgagataaatttccatcagacctaaatgttcccaaagtatattttatatacttcttttaaagagaagacttcacagtttgctcagaaaatattaatgaatatctctgataaatccaacaaaagtggtcttttaacttttatttacccgtagtcaaatgtacaactctgataagcatgcccttaaatatagtgagagaggcactgaagcaggacagcagcacccatgttttacagaatggcagcaatctgaaccagcttagcatcagagaaagcaaagcaactacccttggtttcctgaacaccaattatctcaagcccttctgatcaaaaaaccatttccctggaaccaattgagatattcatttttaatgaaacctttgcaaactcctcccttcttttttttttttttggtgcagaagattagccctgagctaacatctgttgccaatcttcctctttttgctgaagaaaattgtccctgagctaacgtctgtatcaatctttctcattttgtatatgagatgccaccacagcatggcttgatgagcagtatgtaggtcctgggatctgaacctgcaaaccccaggccactgaagtggagcacacaaacttaaccactacacaactgggctggcccttgaaactccccatattttttttttttttaaagattggcacctgagctaacaactgttgccaatcttttttttttttcctgctttgtctccccaaatccccccagtacatagttgtatattttagttgtgggtccttctggttgtgcaatgtgggaaaccacctcactgtggcctgataagcagtgccatgtctgtgcccaggatctgaatcagggaaaccctgggctgccaaagcagagcatgtgaacttaaccactcagccatggggctggccccaaaaaccccccatattttgattaaaagggtaaactattcatcaacatcttaaaacagtcacatttatatgaaagtggctcaacacggcaaggcaccactgcatgtaaagattaccagaatcctccaatctttttccagtcctatatctctgatagcatttcctcatttccaacatagattgttaatctgaatggggaacgggagaaagggaagacaatgagagaaaacttctcagcccttcaccctgtctcacccactgagtcaccgtcaccactacgttcttatttctcctgccatatgctaaactgagtctccaaaagtaggcagttgatagaaaaggagtacagtgtacagaaaatagtacagtgtttcacaacctttagtgtgcttcagaatcacccaaagggcttgttgaaagacagattgaggggcctcagcctgaaagattgtgattcagtaggtctgagattggggcagagaatttgcgtctttcattagtttccaggtgatgctgatgctgttgttctggggaccacactttgagaatcattactaccatgcagatatcataaactttagtgtcactcggacttgaaagtccatctcttacttgtttaggcagctccctctgattctgtgggctgtgtgttcttgtctctacaaactaggataatgatacctacattgcatggattgggggcttttatttatttatttttagaaattaagataataaacataaaattcaaccagaagaagttattaaagtgtggcccaaaatagtcagcctcagttttgtgttctatcaaagtggggcaatcatggttggcctacatccctcccaggcagtgtttttggttttgagatatataactgtgtattagaaaagatgaaaaaaatacaagatgttatctacacatcaacggtctcaaatttaactgcgtgctgcactcatttgggaagctttaaaaattacaaatatttgggtaccatgcttggtgattctgatgtgattgctctgggaagaagcttgggcatcaggatttataaagctctccaggtaattataatgtgcagccaagattaggaaccattgaactagatgtgtaagattctagttgtaaggtacatctatcgcagaaagaattggcataattaggatgagccctgtaacgtcaaataccaatggttagactgactatgttggaacattatgagctcctttatgggtggaatgtgtgttttgggggatgtgagtggataacaggtcttacctcttatgattctgattcagttaagtctaggttggttctcaagaatcctttattatcattcttgtattttttaacttaaaaaacattcccattttaaaatacagctaacagaaggtcacatttgagaacactgacctggaaggtcatacaaggatctaagtacatgattcatataccggctttgcttctttatttcaatatcgagcataacttcagttcaattttaggtgatcatgaatggtctactggggcattaagttttgatgttgccatgcctctatgacatttcctcaattaattaataatttacagtatattcttcccattttttaaggcacaggatgagagatagttccaaatagttagacttacatgctttggacacctgcctccttcatgtcccatatctttccctcttttttttgtcttcactactttgtattacgataggtcaaagtacccattagattcagatatatctttaagatatcactttaatacttaatgtcctttttccctaaaaatcctaagtgttactatcctttttacctaaaaaggaaagatgcttgtattaattttctattatgtgtagtaaattagcacatatttagtggcttaaaaaaccacacattcattatctcacagttttgagggttaggaatccagaaaagacttaactgggttctccgcttgagctctcataaggctacaatcaaggtgttggttgggttgtatttctctctgaatcctggggtcctcttccaagctcacatgattatttgcagaattcattcccttgtggttgtatttttgagattccccactctcttgtttgcttgccactcatctcctagagactgcccatagtcccttgccaatggccctctcacagactttctcataacagggcagcttacttcttcaaaaccagcaggaaaaaggagagagtctctctagtctgctaaagctgagtcttatataatgtaatacagtcatgggtgtgacatctcatcctatcacctttgcatatctcagcactcaaggcaaggagattaaaaagggtgtgacttattgggagtcatcatagagcgtgtctatcacagtgatgtttgtgaggaagcagcaaccccaggagccagcagctgaagcagctgaacttggtctaagtcgtctcaaacatggataatccctacccttggtgttgtagctgaagtccagacacctcctaggggattttaccaatagtggcactaaacttttccttgatttctgcaagagatttgatgttgcggccaaggaaccagcaagagaaaagagatttttcaacaggtcttttctacaccacttgaagtgttggagaactcactgtgctaagatctttaaaaatagatgaagggaaatgaggatgaaattacagggatctacacttttgacaaagtacttttacataaaaagcactaaatcccacttatggtagggagggagagaagagaggagcttaccacatgcatgggaaagggtggaatatggtagttaggatacagaaataagctgctaattgtacaaggcaattgctcttttgtcacgattcttctgagttattcctgaggctttcatagactgattgtgtgaccttcagtaaatcacctcatctctggcagctcctgtctccctgtcagcaaattagggattaagatcttcctttccaatcatgaaggggagtgggtaataattggttttgttctgcgcgtaaaagactcagataaaagatctttcttaagtgcaaagcattactcatgtactttagaatcaaggtataagaacagcattaaaatgttatttcctatgccctaggagagttttctgtcagatttccaagaagtagggctttctgaggagaaggttgtcaacaagactaagtagataaacatggctgaccttctgacttccaaggactactgtgaggcaagtgccttcctgggttcaagtctttcatctgccatttcctaccttgggcaggtagtttagcttctctggacatcaaattctcctttgaagattcaggatattaatacctgtgtagatgagaagttgatgagaaaagttttgcatcacccctttcatttagagcgtggtcagtacacgttagagcccttcagctctttcttctcattctcctgagcacaaaagcaactaaaattcataatgaagaccctgtgatgtcatcttaaagtatgttaccatgagcatgagtttatgttaaatatattctgtggcatttggatgctccttggtttatttgcttcttttttattttaaacttataaaatgtcatgctgaacatttgaaatcacacagggggtgtaaactgaaatatgtaagtgtcctgtctacaatcagctccccattgcaccttgctggaggcaaccactctaactttcttctttattttcatagatattttttatgtgcacatatttatgtgtgtgtagagattattttgacacagatgggtttggtaatatatgtatcctacaaattcattatttttacttaaaaatgagcaatcaatcgtgaacatttaatttaattttcaaacaaccatctcacccactttggtcaggagttccctgtttctggacactttgagcctgacccggtagatggtctagcagattgacacactgactctcagcccctctttgtttgcttgggggtccctgaagagaagggagcagtttccacactgcccttctactccacccttgttccaaagaaggatttaccattgaaggactataccgatccttccccagatcactacccatcacttccctcattccccccccacacaaaaaaaactcaaggaaaaagagaaatacaaatgaactaaggacccttacttctgtgtaacctatcagcttcctaaagaccatgtcctgagcctgattcaccttgatattctccaatcataattcgagatatctggcctattgtcacactcagtatctgattttggaatgaaaatactatgctctgatcacagatacaatcaaaaggctacaattgtcctgtgttaccaatataatgcctaattttttaaagagctttactttcattaaacaaaataggtatacaggatatttaagttgtctttgcctcctaagcctgtcttttctcaataaatgttgccaccttttatccagtcatctagaagctcagctatctttctggattcttcccttaaaagctcctgcatctaactcatctccaagctcagtcaattttctactttttgtatctctcacatctaccccttcctttccctctacgctgcccttgcttctcacatgcagctgtcatctctcatctgttaccacactggccacccagtctccaggcctccagtcttgtcttcctttgaaccattctccactgtgcaactgaagggatctttctaaagcacaaatagaatcctgtcagttcctacttaaaaacttaaaaccaattaatggctcttcattgccattagaagacagacccaagagtcttatgcactcacgcaacaaatgtttgttgagtatctactatccttcagaacctgagttagatgctctctgtactacagtgatccaactagcccttggccagccagctcttgcttacttttccagtcccacctctcactatttcctatcactctgctccagccataaagaactgcctgcagttgacataattccctctggggggtcttgacttgtatttctgctcctgcaaggaatgctattccccatgactcctttacctttcatcaggcaaacttctacaccttctccacatctcggcttagattttatctcaacataacttttttaatcatttattctctgagtgctgattatgggcctaccactgtatgaggtatttaggatacactggctaaaatgatgggtaacttctcttggagcttacattccagtggtggaggtggttggtgaagggcaagagagagaggataaacagaggaacaattaaggaaatatttggtgttgatcagaactatgatgtaatgtgttgtagagagagagaacagagaagttcttttgatgagatggttagcaaaaagttccctggggagatggcactcagttgagtctaatttcaagaaggacatagccatatgaaggtagagaaatggcattccaagcagagagaaggaccaaaaatcctaaggcaggagtgaggcaagagtgtctggaacgtggagtattcatttcattttattatgtctaaaaatactgagaaaccactggtttgcaaaggatcagatacaatatagagtaatgatttttaaacgatggctctggcaggctactctaagtagaatgcagtatagcgggcaaagtacaacagggagagaaaactatttcaggagagtaaggtaggaagtgtggtttagacaaggatggtagcaatagaggagagagataacaggctacaaaatacggtagaggtttagctaaccagacattacgatggtttggattgaaagatgaagggagttgaggactcaaagctaacgcacaagttttggggttgagaaaagctttctctaacacctcatagagtagatttggagattctcctaatgtgctctcaaccattgcactgatttaggatttcctcccctagtctctaagctccctgaaggcagatactgttctttctttacctcaatatcctttagactataccttgtatataatagataatcagtaaatgtttgtgaacgagtgactccaaacaaaaagttcaggaagacatctcagataaaatttttatctccttttgccttcttcttttagtttcctccatatctacctagttagatttaggagcttttaattcactcctggaaaaaaatctaatgaaaagaaaagggaaaaagcatgacttctctcataaaagaactatacgcatttattgggtttaccaagtggtcctcaaaaatgttaagggcagtttcatatggcaacaaagaccttcttttgattctattgtaaaagtgtacaaagttttcacccagaaaattatccacgtcccataatgctcatcaaatattctgtcaaatatgtaatgagatttctgtggctcaagaacccctcacaccttagcaatatatttcaaagattgaaaggaagagattgggtggtgacatccagactgtttccatgtgtgttactcagagtaggttcattgctctaacatacagtcccagtatttcagtggcttaatgcagcaaagatctgtttctctctcatcttccaatgccatgtggatcattaagagttgggttcaaggtggggcctctgctccaccaactcattgaagatactccttccatctagtggttccactattacttacagcctcaatatcctccactgagtcaactgcatctggtctgtggtcacgaaaagagagcgagcaaagaagaatgggtgaggcatgttgggcttgccctggagtggcaggcatcccttctgcccacattccactgttctgaactcagtcatatggccccatctgaattcacaagaggcttagaaatatagtcttcctatatacataggaaaaaaataaaattcctccaaatgagagaatggcatggaagaaagttatatcagaggtttccaagatcactcccaggtttgatgatttgctaggaggactgacaagactcagcatatagttgtactcacagctatgatcttttcagccaaagggcaaaaggaaaatcagcaaagggaaaaggtgcacagggcaatgcttggaggaaaccagctgcaaactgccaaaagtcctttcctagtagagtcacacaggatgtgtttaattttcccaacaatgagttgtgacaacacacatgaaatgttgtctaccaaggaaggtcattaggcactcagtgcccaaggctcttattggggctggtcatgtaggcaccctctgtctagcatgtaccaaaattccagacccctagaagcaaagcaggtattcaacataaaccatattgcttgcacaaactttttaggcacagtgagccattcttatcagggactggtgggaactctcccaaactcaaatttcccagatgccaactgctgtggactgaattgtatccctctaaaattcccaatgtgtctgtatttggtgatgggacctttaaagaggtaattaaggttaaatgaggtcagaaggatgaggccctaatccaatagggctggagtctttataagaggaagagacaccagagatgtataagcacaaagaggccatgtggggacacggtgagaaagcagtcacctgcaagtcaaggagagaggccttaggagaaaccaagcctgctgacaccttgatcttggactttcaacctccagaactgtgagaaaatgaatttctgttgtttaagcccccagtctgtggtatttgggtatagcagccctggcagactaatagatcagtcaagggccaacctttcaggcagacctttctaaggacagcagtctcagtcctgtgatggtaactcttttctacacaagagtgcatatattttggagtaaagatgataatgtgattaggttccagttctccctaccactgggcaagttacctgacctctctgggcttcacttttatctcatctgcaaaactggagaaataacatctcacagatgctttgcaaagataatgaatgtatagcacagagtacagaacctgtctcatgatgacattcaaaatatagatattattattattattccttttactattatcatcattagcaccatcgtcatcacactgcttccctgaattgtgttatcggtctggaagctctttcttaaaatgtctttgcctcacacccttgcctaaggacaaatttggaaatagtgcactttattttggtttgattttgctctgtcctttgaattcttggggaaactgaaatagtctttctcaaaatgacttcctcactgggatttcatgaaaatcaaaagagataacataatttgtgatgttttaaacataaaatgaaacctagagatgtaggtaattttaaaaaacaagttacataaaagcaagccttatataaagcaaaaattctctagaaacatttctcatatctctaagatttttatccatttatgcacaacaatcctgtaaataaattaaagatcaaactttattttactctcaaggcacgggtgggttggtccaggctgatgggacattcagggacccaggttccttccaacacattgccctgctatcccttggctaggctactgcccccatctgcattgtgtaaactaggtcagtgtcatggtcatgtctggagggaagtgaaagagccatagactgggggtagatgacttgtcttaatttagagataacacgaaagttatatatatcactttcacctatattccataagttcattagtcatatgaaccacccaactcctggggaagctaggaaatgaagcctctagttggacagcagtgtaggtagatagaaggagaaactggattgagggaactactgcacctcgtaaaagtcaataaaaactccttaatagtgaacttttctagagaacatccttatgatttcctaagtttgttcagctaatcctcctaaggcaaatttttagtctggaagaaatatgtcaactgatctttcaattcctgtatcacttgaaggatcaagattttaaaaaataaagtctctgtcttctgaatgttttgaggtttcctactttccttagcactgtacatcagaactgtacacacaacaagtgcaaaagcagcttcatccaaggaggtttgttaatacaatttgttgttcatggaacccagtctccacagcacagaatccaagcacaggggggtagtaagactaccacgcaaaccaacttcaacagcattattccttctcattcttcttggaaaaactaattggttcacacaaatgtatcactgagagcccaataaataatttttcaaattcagtacatgttcttaaagagcctgctgtgcaactttggatgttttgtggctaaaactaaaaacaaatctggggcaccattcatcactgcaagctgctggcagcgaacctaccccataaaatcagaccatttcccattttttacagttcttacttaaatgtgttcattaatataagcctaactggcaattattccagtgatcctggcaggcattcaaatcttcattaaaacagaataagctgccaaaactttggaagtcttttcaatattacatttgagttgagtatgttagactataaatcctcttaaatctgtgttaattaatctaacttgagggaaatacaaagaaatgtgtcaaagaaaaatgagatagaatcagtaatttccttattatgcacattctaatgaattatgttgaatatatgagatttcaactctcatagaattttataagattgagtcaaatcttctcacttcaagctcttcctggttattaatcctttccacaaatttatatggaacaccaatcacttactgaatacttactgtgccagtattgggtacctataaatgaataaaagagaactattctcaactcctggacactacagtagtctagtggaagaagtgtaaaattaataagaaaggaaaaaaggattaagtgcaaattgtggtacatttaataaagaaaaaggacagaattctgtgagaaaactcaagtgaacacaggggacctagaaggtgtgatggttaaattttatttgttgactgggttaggctttggtgcccagttgtttggtcaaacagtagtctcgattttgctgtgaaggtactttgtggatgtggttaacacctacaaccagttgattttaagtaaaagagattacccttgataatatggtttgcctcatgaaaatggttgaaggccttaggaacaaaatctgcgatttcccagagaaagagaaattctgtaatctactttctggcttaccaacctgctctatagatttcagacttgcaggttcccacgatcccaagagccaattccttaaaatcagtctctctctctgtgttccatttctctgtagaaccccaactgatatagaaggcttttcttaaatcaaggtttttttatgccataactaaagaaagaaccactcatgaaaaggaaaaagttacgcccagttgaagatacagcaagtggaaaagccccaaggcagaaaagggtttataatagccaagaaaatagggaagattgttgtgactgtgtttgaagaagtgagagctttataagatgagaccatggagcaggtcgcacagaaccttgcaggctagatttggttcagagtgtggtaggaagccattgatagctctaatatctgtcttgtttcttcgtcctgagttctgttccaccctttcaggtgaaccctagaacatctagattctagatcccctcagaagccgccttccaattattcttggatcccaacacctgaagctctgtgccgaacacatcctcccttcaccaaacacctagtttaggggggcttctctggctctgcatgtccgcaaaaatgtttggaacaaggagatacaaagattgagtaagtactctaaaagcaccatttgtgagcatgttagcctcattgtaagtgagtggtcaaagaggctagcaacttcaagaaaagagttaatatttgagccaacctgagcaagtagtcatcatataagttattttgcataagtgaccaatatacatgatgccaaacaccatgttaaacaaatgggcagaaatgtattagagttgataaattatggaaaacaacagaagtggaaagacagagctggagaactagcaggggacacatatgacctataaagattctgagaatcatcactggaataccgtaaaggaaaagagagagatcagtgtcaccaaaggacacatattactagtatgttaataaaccttgatgtgtagtttcattatcataaaatgcttccatatacgttaggtcctatcatttcaaaactacatgaagagaaatattaacattttgtggaagagggaacaagggtagcacatctgtaagagtgacccaaaatcacaagttatttggtgacggaaccaggactcagacaaagttttggctctttgtccagttccattttgtcacggcaacatctattcaccatgcagaaaactttcaatataatctattaattataaaaagaagtgttcatttaaaacctgtgaggaacaaaaaaggatcattcactggagtagataatgctactccagaagattaactcacggtcctcttgaactgcttcctttctttgttcaacgatccttggttaacgaagagaaatgtttagaggaggctaaagcatcacctaccaaatccttcaaggtgatggaccttatattttaagcatccaaataggtcaacaaggaaatgtgaatttgaaacctctgtagacaggccaatgtacaacctaatatctattttcatttttaatagatcacctattgatcttcaaaaaattctgaaggaaacttgcattagacatacatataatatgaccaataataatatacatgatagattccacaacactgaggaaatgagaaaatttaatttaccaaaagtttaggccaagagacttactgccatttggcatcatgtttcatccttaacttctcagaagcaaaagtattcagctttttttttgcactggctttgcataaatgagccaatgacactttctcttattttttttttcttttttgatccctatcataattcctggttatatcacttcaactttaggtagttttctaggtctttagtctgtctagctttctaaatcattatgccctttcttgtcccataaagagatcataaaagatgtgttgaaatagctagagaaaggaagaacaaaaaatactccaagtggtaatttagtgtcatatcaataagaaagtaaatagcataatttctgcagttaaaatacaagttggatctatttaccagaaacatggcccaatacagagctcttcatggaagaaaaaggaactaaacattatttaaaataaacaaatttcaggaagggacttgattagtccctttgtgttttattgttacagcttgtgatctgtaattattttaagactctgaatccctatatgttattcatggtgattggaaatggggtgggcaatagtatttttcatgcagctaatagtagattaaacacatttaatataacatacacaactgagcaatttactgcttgtcagcagcagaatcaaggcaccatgtaatctgtgcaatgaagtgaatgctaatatgcctacttggtttcttctggaactccatataaatccccatcttggttccctaatggaaggcaaacccgttactgaacacactttgtattatcattaataagtgctactgatttattgggtagattacatttattgaaaacagaatgggagcatgcagttaattaccagtttttcctaattaattagtgttttatgtgacaagaatattcttcagctgatgacagtgctttatgcagagttggatgagactggcgtcgaaacgaggctatctccagaagcaccctgtactgccctctcatgtgcatcactagtgctggggatttagggaggacgtgtggttcaggcaaaggtggagaactgaaagccgtctaatgctggattctagtcccaggtcttacacttattagtcattttaccctgggaaacctctctgaacctcagctttgttatttgtaagtggagataggattacctactcacaatattggtgaagagtctaaaagaagtaatatataagtggagatgtttatatgtggcagatactgatgctgagtccctgaaccctggcattgaataggtcccatgtaaacaagtgtcccgggctgacacgcttggggttttgcagtgaagggaaattgtacagtcagagctctgttaacattcctttgagaacaactaatcccacctttcccaaattttatagatgcaaatactgacctgtgtgaagattatttgtcttgaagtcaaataatcaatgaaatagtcaatgaaataatgaggtctctgccacctttgccttcagttcttgtcttctgtctctcaattcaggattctttctactacatcacacagcctctggaattctaaggcaccttgtccataccatataccaagtcatgaaatcttcaaccagcaattcacacatatttattgagttgttgtagaagatgaaacagcaataaacacctgggaaatagacagtaagcaaatagatgcgattcttgtcctcaagaagtgaagagaccttgtaatttgagttatctgtttttctttatcaccatagaacctgggccattgcatacatggcatttgttggcagagtggttataaaattaagaggtttagaaacctcccaaggtcctatagctaattagtagctgagacagaattataagacacatctgagttcccagctcaaaatcccagcctaggatcccaataagaacacagagcatgtctaaaaaggagagagagagagtgaaaataaatttttaaaaactcttggtcttaaacaacaagaatttttagctcttttatatgacaaggtagaactagaattcgtaattcttaatttgatctcaaaagactgccctgaggtgagcaattgatatttgtcatgcaggtgtcatgtgaagtcctagattatacgcaaaaggatttataagatagagaagcagcctaacatgagggtaaagagcatagaccccgaagtcagactgcctgggttcacatcctgattctgctacttactcactagtgaacttgaagatatatcatttagcctctctgtatctcagatcctattcaaagacaactttggctcttttgtttaagcattcagaagaatggattgatatcctgaaaagctgaaggaggacaacatttgaagaggaagatcaggagtcccatcttgtttggggatttagaatgtcttgtagacctcctaggagagttatggagtgggtagtagcatatgtatatatctagagtgcaaggggagaggtccaggatggcagataaatgttggtgacttcaatatctaaatcatatttatctccatgagactggatgagatcagcaagggaagaaacacagacacggtcagatttatgttttagaaatatgactgtggcagagcagagtgagaggaatgagagtagaagcagttaaaccagcttggaacctactgtgggagttcaagcttgagattagcaaggatgaaaaacagcagcagtaaccatggtaataatgagaatgaattgtaatgaaaaatgaatacaataccagttacaacaaaaatacagcaaaaatgctacaagggccagtcccctgctcttgtttgtgtgatctgaaagcaaggaaggcagagattcgtctgtcttctgggatgcgtgcactggcgccacaaaggaagactggactctcatcttgagctgactcagaaaagacaaatttcacaatgttttaaaaaatgaactttcactcatttttagaatatatgctctaatcccttattgattttgccttcgctctacccctgccatcaccagcaccaccgacctcccataatgaaaagcttgagacagtaacaaaagaggcagtaagaaaagtttctgatatttactatctttagcgtattgtctcctttccagcagtttgggcatttgaaaacctgttgttcctatttcttggcactctcttcttccatttgcctaattattccttgtgtccagcattcagacatcaaaagtcttatatgtgtggggaggtgggagaaggggtgtatatgtttgtgtgtgtattaaaattcaatgaacaaggtgcccaagaaaataaagaacaaaatagaagaaactggaacacatgttgcttagcaaacaaaaggaatgaaagagagagaacggatgatttagctttgcagaacgggctggaaggccaattaggatgcgaagaaacggataaactggacagattcaagtcttctgctctttgatgtagatgatcctgattttatttgcgtattaagcctctgtacactacttaatattagtcccctacaacaaatagatcttctcatagaatcacttaaaatttgattttctgtagattttaaagtttcggatttgtgaactttccaaaggatgcacagaatatactataatcgcagaggaaattgcagtttccagttccctccattccccaaattacttaaggtaaatccagagaaaaatagacacccacagtgggctctgcctatatgttacatgtcacagttgcatcagaagccagcaatgttagcaggttattttattactctaatctatggtaacatagtctcatgagctaggtatttttttaatcatttcacatgtcaaatttagttccatctagagatgtagatgtgcgttttgtgtgtgtgaaaaccagatagaagggcatgcctgcagcatgaacaatgcccttatgtgaagggtgattctatttgtgaaaatacaaggctctgaataatgactggtggatctccacattgcctaccagtcctgtgaagtcttagtcaactcctactagctttggtacttgtttcagctagctattgctgcataacaaactatcctaaaacttagtgtttaaaacaacacggacgcgtagagattaagattcaggtactgtagattcagattgtggattctcacaactcttcaaactggacagggttcaattgggaaattctgctgcacatggtatctggggaaccagaatctctgagatggctgcttcacttgcaaattggttcctcagctaggaaagttggaacaagtagagactggttgagaatatccctctctctctcatgacctctaagcatggttagtgttatgtgctgaactgtgttccccttccaaattcatatgttgaagttccaacgcctagtatctcagaatgtaactgtatttggagataagctctttaaagaggtgattaggttaaaacgagggcattaggatggggcccaaatccaacatgactgttgtccttataagaagaggaagaggaagagatgccaggggtggtcatgcacagagaaacaaccatgtgaagaggcagcaagagggcagccatttgcaagtcaaggagagaggcttcagaggaaaccaaccctgccagcaccttgaacctggacttctagctccagaattgtgagaaaataaatttctgttgcttaagccacccagtctgtgatactttgttagggcagatttaacaaagtaatatagctagcttggggtttctcacagtatggtaatttcagagcagttgaacttcttaaatggtagccagcttccaagagaggagaaatgcaaatccaccagtgctcataaaagctgggccaggaactggcataacatagtttctgtagtatcttcttgaccaaagcaagtcacaaggttggcccgacttcaaaggaaggggaaatagattccacctcttgatgcgtggagtggcgtgtgcttacagggagagaagaaattgatggagccgtcaatgaagattatctaccataggctctatcaaaacttcacacttctcttcagcccctctattatatatatatcctgcccacttttagaagaccttgtttcccagttcagttaaaacattgacaccatctagggttaaaactcacagtttctacccctctactaaaaatcacatggtagtacccattatttcttttgcttttttcctctaggctctgataggaaggcattttcttcctattcaaagttaattcatgtacgtgaggcccaaaatgttcttcattccaagacattttcctgtagtcatcattctctcttttgaatcttaaactgcctagtttatcaactccttcctcttaggcaaatatctctcctagtcccaaagtatcttccaccttggagcaaagttttccagagtgtgctgtaccataatattactcttttcctcttctcatcagaaatttttgaagtagggtttactctccctatctccatgtcattacttaggattagtttctcaacactctgcaatatgacttctatccctaacattccactgaaactgcccaggacaaagtattacaaaaatagcttcctatcttaaaaatataatggaagatttcagtatttatcttgttggacgtgtcacagcatagaatggttataacctctctgtcgaaaatgtagtctacttccttggtttctctgctgttgtagctctctaatccagaattttttcattttcaagggttttatttctacacacatttttaaaatactgcttttccttggggttttgtcttttctaattgttcttttcaatttacattctcctaagaggagcacatccacgtttgtggaaccatctgccatctttcccagtaaatctcaaatcagcatctccagcgtacatttctcactcaagctttctgtcccattatctgctcatcgcttctgcctaactttggcatagactctccaaactcaatatgtccaaaactaaacatgccattcttcacaccccaaaactgcattttcccctacattctctattttttgagggttcatgaacttccacattattactcagcctaaaaatctgggatcatccttgactctttctgttccataatggcccatgcccaatcagccatcacgttctgtcagatttatttttctcaaatttatcctcctcttttcagcccagtccttcatgccatagctcaagtctacattatttcacctatgaagtagtcgagaatgttctaattaatctccatacctctatcttctaatcagaatctagtctccatcccaacaccagatctcacaagtaaaacagaaaacccaaccacggtaattcattactgaagttagttctttactaactctattttctgtcaatgagaccaaatttctcaagtccttgagccaaggcacactgtctgcttttcaagtttactctgggaaaccattgaggaatgagatgaaataataatgaagtctgagtccaacacacagtcagaagtaacatgttcttatattttgctttaaaataaattaaaatcctcagagcatttggaatccaaaaatcaataattttaaatacaggatctaaccaagtttagggtaacaatgtatttaattgtgcataagtagtgcttcagaactgaataatctgtagttatgtatcttttttatatgtgttaggtagtaataagaaggaaaaagcaattatgaaagccagtaacacgtgacaatcttttgatgctgcttgttctgaaacactacctctaaaatcattataccatgcaactacaagacatcaaaaggaccataaaatataaatattgaagtaatacatttcactttctatacaaatttgcaattctaaatcaggctactttttgtgtttcttagtctgaatttcacttcaagaaaattaaatttgctttaggatgcaattttacaacaggaaaagtaactgattttgcccattgtgaggatcagcaaaaagtatatagagattgtttgcagtttccaaatgtctctggcataactctttctttgttttaggcactgttttaaccattttgcattaaccataatgttcaacaataatgttcaaagtgtcttatatcaatatatacaacaaggctatgaaatgcatacctttatgacctcaattttacaaatgaggaaactcaagtacagagattaatggtgttacctaggaaaacacaggtgggaagtggcagagctgggattcaagcttaaccagtcagcctacaacaggtgctcttaaccactattccatgcttccatactctcaaaattgttacctgctttctgttcccactccccctactcaatttcaaagctttgactattggaatatcttaattagcttccttatttctagtctcactgtcaccaatccatccactagatttatgtccaagtgatttttataaataacaaatctattgatgctaattctgcttaaattcttcaatgacattcgaggcccttcaggatttgacgttttcctgcatttctaccctcattccctgtcactctctgcctcacattttatgttctagtcctactggactaggcaactttccagagcatgtgacatcttctcttgtcaactttgtaatttgattcttctaacttaggcactccatggattactccacgtctcagatatctgtgaagcctcctctgtcctcccccaacctcccagaccattctttgcacttctcctatggtgtgatttcattgtatagttggcttatctgcccatttccctacaatattggggaggcaggtgctgtgtcccttcgtctttgagtcttcagtcctcaatgaatttaaagtgataaatgaatagatcagcaaagtgtagtttgagagctaactctgttagttattgacagtgtaactttacctcaactgtaaaatgagataatgatagtgcctatgtatatcataaattgtttgtggggattaaatgagataatacatacaagatgattagcacaatgcctgacgcatggtaaatgccaagaaatgttagattctcttcctattattattcaggaacatttaacatcctagtgttcatgaaagttcaatgcatagtgttctttaaatttgaatgtaaatgaataagggcaataatcttactttgtacctattgtatgttggatttaatttcccagttggtgaactcaaggctattggattaatactataattggcaggaaaactagtggagttcttccaagtgggagcagcaacaagctccctcactatgacactgcagacgttcctctgcccaggctctatgcttggggcactcttgaaaaacaaccctgagcacttggagaagctatgctctcactagacagctacttatgtcaagaggatttcagtcctccaagggatggcaccgttctgagagctgagtcaatctactgaaaagccataccaaaggctagagctggttgcttctgaagaggattgcatttcttttaataacttcaagcagtaatttcatcatatttgttgactaaaatagtctgtgctacctttgtttcataggcttccatatcaggttaaaaggactggaattgacactacaactattaccccaccaccctggcctcctgttattgaatgtttgtgtcccccgaaaatttatatgttgaaaacttaacccacaaagtaatgattttaggagataatcaagtcatgagcttggagccttcagggatgggattcgtgcccttataggaagagacatgggagagctcatgtcctctctctgctctctatcatgcgagaatacaacaggaagtaggcctccaccagacagtggatctgctggcatcctgatcttgaacttcccagtctccagaactgtaaggaatacatttctgttgtttaagtcacccagcctatggtgttctgttatagcagactgaacccattaagatataggctatctctttttgaggaacgccccttttagtttcaccatttatttacctatttgacatttgaaacatcatttgaacacctctgaacctgagattcccaatctctaaaactgggcaagaaatgtctcacatgcagcattgcaatcattaaaaatcatcttcgtaagggatcttgcacagtggaagccggataacttgtgcccaatccatggtgctcaacagcagtggggatcattcattttcagttaatcctgtgactatcaactcaacatgaatgcccgtacatggatctagaaagtaagttttgtttgtttgtttttccccacaattcaaatgattggttttatgatcaatttagggactcagctgttcctttaattatcatccagtctcctcatcacccagcaccaaccctccaaggaatcactggatggaaaaagagtaacttttcaaagacaatatctgattacataggaaatataataagttgtttttagattttaaaatccacagtaattgcattatcatattcatatgtttattccaccattcagtaaatattgaacactggccaggtggataaaaagacgccccaaaagatcttgtaatgaagggggaaagaaaaatggtaaattgctactatgataaatggccataaggtgatagtaaagggagagtggagaaatgagaataatgaagcttgccaggcagggtgagaggagtgaaaaggggacccggagaaggtgatatttgaattaggacttaaaagatcacggaaccttccctagacatggaaaagacactgcaatcattggaatgacacatgaccaggcagggcaggatggagcagcatagagttgggtttatgtcaaatgtgggactcatagtgaagaggtatcaattagcagctaaaatggatattagagacacactatcatgggatttatgttcacaatgaggatttaggaatttgtcctaaaagtcagaattggaaatctgcctgcagacctggcttcaggtcaaagactcctcctacaaaggagaggcttgggctagctccacaggttcaagggcggctcaggtttacactgttacaattccgatctacacaagtaaactaggcaaccttttatgaaccttccttcctatcctagtgattggttaaatctttgtgacattattttctcagcagaaaactttcctggcctaatggtgtgggttcatgtttggaatgaataaatattgacttctttctttctccattaaaactactttgaatgcctctaaattactactttctacaaaattggcctgaacatcagagcatgagtttttgtttcagcatagaactacttagacaatccagtgtccaggtcccccaggccaagataaattcaatttcctaaagaaacagagaatggctaactgagcatcagaaccgatcctttcataagaaatatgaaattcattctagagtccctattagccagtctatgccaacctatgaaaaatccaaatagtttgtacaacctccatagtcctttcagttttgcttacaaatttcaagtagagaaaactccggttattttcaaaagaaaaatctgccgttccttggatgcaaaacaactgagttactaagtcctcaagatgagagaactactgaagggtcttcaactcttcatcttagaactagtcagtctcctttggaaactcttctcaagctcaacacactagaaaatcataagcatgctgagttatgctttgcagccaggcacctgccaggaatgaggaaatttggttcaatattccatggcaactggagaagcctttcatcttgccctggatcttcttcttatagagcttgctttgttggcaagtgtccctggttcccttcagccttttgccagtcacagctctgaagaagagcattcttcctgccttctaggaaaggagtatgtgaaatttcaattggacagcatcttgaaaaagcctttatcttccactcaaagatttctaagagtatttccaaatgcgttcatggcgcagaacaatctgcatttgtcagagtagtgtgatttttggaaggctagctggaaatcttggggaagtttttccacctgtcaatactaatatgtagaaaatgatacctcattcacattgtatttttaaaaggggcatggtaaaatttgccatccaaaagtttgttactcctttttatcactaatagtgataataatacatatcttctactagacaatgtactagacaatttcatacatttgatggcaatcttttagggaaaagagtttgaggttttcaagaagtaagtatctcaggagggcattcagatgaatgtaacagacaggtttccggtgttggttgccagccgaaaaaaggctctgcaggcttgggtttaaactatactgtatgagcaccatgatagcaagtggacctagaattcttaacatctgtttataacgtgttagttttgttgcctaggtcactgagtttcccacttcgttggagcttctgtaaaatctgagtaataaaatgacacattgtactcctgagagctgagacaattccttctctccctagtacagtggtcaatgcataaaatgtgctcttaaacagcagccaccaatcacactcagctttggtagtcatcattattcttttagttaattctttgagcattaatccatcagagaatatcgaaacatatatgaagatagtatttcattatttttcttcatgattcatatgatttattttctcatagtttgaggattaattatcagcgactaagatcgaataaaaagatgggctggtgtaagatattccaataataataaagatgctgataatctaagaggagtgataatagtaattaaaactgctgttcacttaaaatttattggctggtcaggactgtgtagacgtaaggaatttaagctagtgtaggcagagagagagattactgcataaataagagctgtttgaaggaaccccaaaccagaaagtacaagtgatttcagtagagattgggatccaaaactggaaaactatctggaattaaggttgatattaataaagtcatattgtttttgctttttctgcttctctgagcctgtggctgagaaataatttccccaggtgttcctacaactcctctttgctcaaacactgagagagataattagagtctctgatttcccgtccagatgttccagtgagcaaagctaaccggccaatcttgttttaggtgtcctcccctaattccccctcttttcctcctctgttccagtcagcactggccatcagaaagagttaacagttacaaataaggctgcagagtcccttgcttgtgaattggggagagggaggcacaatcacggagttgagttaatttgtcccaggtcatttaactaatagaaagcagggcctggaataaacccaagcctgtctagtacctaaggtcactgtgtttcctggagctttgttgctctgccatcaaagtggtctaaagcagtgctcactggtgactcagggttggcttcagtgggacacaacagtgagggcctttgtgaagctggtcctcacctaagaacccacgtccaacatcatgaaaggacaatgaggaagtgagagggcctttggggtaaacagtgattctgtgcccaccacatgaggtggcttcagacaagtccttaaggtcagtgcctctcaaatgtcaatgtgcacaaatcgcctggaggtcttattaaaaggcaaattctgcttcagttctcctgtgaggaggcctgaaaatgcatttttagcaaattttcagatgatgccaacactgcagaccttgtcacggggacacactatgtggaggagtctttagaaaaaagaactagggaaattgaagcagcaagagttccagagtttctggacccaacccgcagctgcacagatagctgtttacttggcaagctcggtcccctgggtttgcctttccacgaaggcaagatgagtaactagacctacagtagcctgctggcccagtaaataaagagcatgtgcaggctaaaaagacagttggcaaataatcagtgggtggtgctggcagccaatttattggagcttgtcttgttaatatacacagactattttgtgccagaaatttttttcttttttccttaattcagctttggagaaacttactaatatgcatcgtgaatggaatttttacacatcttgctgattaaaaaaaatatgtatagtgcactcagaagtcattatttggcattatttgtgatgtgtgtgggctttttggtactcctcttcctgcctttgataggagctcagaacctaattgccaccacatatttatcgcttgcttaaaatatgttagacacaatgtaaaatcaattacacatcttatcccattttgtcctcacaaaaacctaagagctagatgttatttttattcccattttaatgattacaaaactgaggccaaaaggtattatgctagatgaccaagctctgtctaatactgatttgactccttcatgaaacacttccccactgcccttactgtcccatcgacaccctgtcccttgacttgatgagttgaattgagttgagttgatccctttcagttgatgctgagttccagtatccagttttaactcatcctccacacagactgtctcctcttttgcccttcatggggaggttagaaatgttgtgaagccattctggctactcccaatccctgtttattttgaatatgttttatttctgcctgcctttggtttatttcattagctaccattctcagtatcctcagtagtagctccagatattttccacgtactccaaacccaaattccaaatgttcctgcatcccttttagcagataacttcctcttttacttcaatgaaaagatggagacacattttcctaaagtcacttacatatatttttgactgaaaaatcagaaaacttaaatgattgtgatttaaacaatgaagaatataaatctctctccagacaggaaatttaaggtaaccagttccagaggtaacacatttgctcgatgctgtcattagacccagatttctcctcctccatcctgagcatttaacttttggtttttgcatgctactgcttggttacaagaggctccctcacttgaacatcatgtctccattttactgagttcaaggaagaaaacttatttatcatgaagtaagataattcccagaagtatcctcagtagagatgatcttgatgtatatttggcccaaacttggtgattttcccacccccaaatcaatcaccaacggaggggaatgggatggccatgccgagtttccatcaatcacggtcgtcctctgggacttgggggagaaccgaccttcccgaagcacattgccacgtgaacagaactaacaaacttggcttctacaaactaaggaagaaagtgtagtatggtcactgggtggcgacctacagtgtctaactcatttcctccatcttcgcttctctttctcctgctgcttcctccctacctcagaagtgccacgtggagtgatctgtcctcttcagttttctgtccctttctttccaaggccagatcctccacccagcactgctcttagtcccatttcctctctctttctcttcgccccaccactggaagtaatcacttctccagctttcaacttctctttccccttttccctcaaatatatgccagtatcccttataagaattaatccaaacaaaacaaaaactaacttttccttatcctggtaatgcttccaaactgctatcctagatctttcttttcaccaacaaacacctccaaaaagtaatcagtactctctgctttcattttctcatcactcactcatacaagtctgtagagtctgacttctgccccatcaatgaagagaatgcagcaccatcaaactctgatccaatttaatgacctttctttcagggtctatcttcatctgggaacttgctgttttcttggtccctctagctctgcaaattctgcatctgtccatccccagtcacttctttggcttctccatctctgtctcgtttactggatcttcttttctagactgtaagcaacttgaggaaagggaccatgtcccactcctcatcattacccgcacaatgtgcggtgcagaattttagatcaagccttcatctgttgcaaaacttctcagctggtctccttcacttcttttctctccgtttccaaatgatcctgttcccagggttatacttctaaaagtacaaatttgattatgttagttccttatttaaaaacataaactgcttaatgtgtcggtcagtcaattttccttcataaaacaacccaaaccaattttctaacttgaagttcttctaactatatctcccctctacactcacacaaacacacacacacacacacaaacactcacacacacaccatgcacacattgtaagacaccatgtctcaaagaatggtccgtatgccatcttcatcaaagtcacctgggaaatttgcttaaaatgaaattcttgggccatactcaagaccaactgaatcagaatcattaggattggcctgggttgggtatgtgtgtgtgtattttatttttccctgaacaagtttcaccctgagctaacatctgtttccaatcttcctctttttactgagggagaattgccctgagctaacatctgttgccaatctttctctgttttgtatgtgagctgccaccacagcatggtcactggcagacaagtgcgtaggtccacacccagcaactgaactccagccaccaaagcagagcatgctgaacttaaccaccaggccaccggggctggtcctgggtgtgtgtatttttaatatgcctccaagacaatcttaaaaatctgaagccatgtcctaatgttatactcaataagcaaaaattgattcaattaagtatgaatacctccattttttcaatattgaagcatttattatatctatttaataattgtgtcactttttttttttatggggatgggacaaggaagcctctaaggtcaagttgagaactggatgaagtatcactaggcaaatgggctgtttccctatggacaatttaattcccctgaagaagagtttgaacgaagtgcaccagctcattcacttttccatttggatgttttggaaatgctagagttcgggtacctaatccttgacaagaacttacggcttgtggtttacttttcctctgtaacttaagagaagattctagcctcccaagttgctgggtggcgccagtggtggcaccagccacagggggtcacttggtgtaatcctcaaatgtattgagttcatttgcttctcccacttcgcaagcagcagccgtctctatcgatgccacagtcccagcatgctgacttcccacatccctggaagcacagaatgctacaggatttaacaagcacacagctgcgtttaatgaaagcatgccaaagttccagttgaaattggaattcaaagttttgtgaaattgtacaaatggcaaatacagaaactttgtggaaacatatttgttattgcaaagacttactttaaaaatttgctgtttcaacggcaaagacaatctctcttgtttactcttgctacaggttttctcccaattctcccttcccagctccaaccctttccattcatcttagtgactatgcatatgagataaaatagcactggagtttctctataactgcagccatgttgaagaatgtagctgatgatcacattgtaaaccatgtcagagttagttgggaagatggtcagaattccagatccaactgtagccgtttttccttttcgtacagacatagctatagtcatagttggtgtctttctctctctatccctttccccgacttccatttctgttccctctctcttcttccactggctcagataaataaacccaccaaaacacgttgctttttatattgtctatgacctgaggtcacagaaaaaagactcaaaacgaaaatacaaatcaaatcagatccataaacggatgccagaggggacgataaaataaaggacaaagagactggtccaagtatctcattttctccacaaaattactttcagcttgaacaatggtttgcttttgctgtctttgttctccagtgacggcaacaatgagggaaattgtttcaagcgatgaactgtgcatgctgggagctagagagaaatagattggccccagttgccaaagaggggtgaatattctggagcactatagttgggcgtagacatcagtgttcactttggcctgagggaatcatgctgagttcacacaggttcacgtccagaggagtgctgctgaagaaatcagatttctcggactcatgccctaaacagcatgctggtcagcactccagagggcagtagcctctgagtatctcatttaggagtcagggctggctttcaacctgctgtggagtacgaaggtaagaacgaacagtgtatgtatgaacaggctcctgagatgagctgcagctacatgccacctccaaggagcagcccaaaatctataaagtttcatgctatcagacgtctgttaaagagaaatttcatatgtaattgcaagagagtacgtttattatagaaacattcctgataataggaaagcaggatcttgcaccctatgacttccagaatgacagtgattgaaactcattccgataatgcaattgatggctaggaaaggcagaaaatatataaccagttcattgagagtttatacgttcacttcaggggtgaagagagagagaaacgcagtagcccaaagtccacatctagacagacaatttccagaatgcaagttcctccagcattaacctttcactttatagtttgtattatggcctctcagagtgtgaagggatttacggaggtcaaacaacaaccacaaaaacatattctctaaagactccaggcgttcctccatctcaaccctgacaccctctaacctcacaatttacctgctgaacaacgcgaggttgcatgtatgttttctggcacttgttttcttctccttaacacagttcattggccacactctgtcagagtaggtcccagttcccactggttttcatagtacagactcttactgtcactggagaggttaaacaaccaagacagtaaatgtgagtttgtaaactccaaaggacaatgatactagagacctaagttggtttttttagctcaaagtttcccaagtttagaaggtgtggggtcacagaggcatgtttgctccttctctgggctgggtgctggaaatgcaaagatgaccccctgaccttaaagagatcatcaattttgctgagggtgagagaggacaaggcggtaaacagtttatgataaataaatcattgacagctaactttaaaatctaagttaaacagagcttccagaaaaaaagttttgcatgcagcagtggagatggaggtgagtgtcttgaaatggctatctcaaatcctcccataactagctcacccttattaatgctgcatgtggaccagtctgttagaacccagagtatagttgacctttcatcaataatggcaaaattttcaacccatccagcgtatttaacggctactcctttaatgaacagcacatttggatttcttacacactttccaagagcagcatttgggctgtgaacactctgatttcaccatattggctgaactagtataaagtgtgatgagccaggcaagtcaacggttagcaatacaatacaaaagattgtccttacaaataaataaatgtcaataattatgttcttctaaagttcaaggattactaaatacaatgatgactcttttgagagagctacatgcagttgcctctaaataaatcgaggcagagatttcatctcagcgcctattgacatgaatgtcattgctggtttgtgatctcccatgtgtcctctgtcatttttgcattatgtgaatagaggagctgtctcaattagcagatctattgcattcatgacatcattaagtgtttttatttatctgtttaatcttatcagcagaacattgcattgccatgctcccaattacatgtcatattctgccatagtactaacataagatggatatgaattcagatggcaccatagacaagctgaccttccattgtgcagcatagtgtttactcatgtgttcaagagctcctctaagaaataagatattgagggagattttccccaaggacatccagtctttcaatacttccagcatctaaaatccagtcttacatcaaaccagatcaatagaaagccaaatacttgatccacactaaggtcccttgataattgcctttactgaatctaattgtggcatgatgtcatcaggcagtatgtaagagtgttatataaaacggctctgtgaaacttgctgttgtgtctactgtaggcacgccagagaggatatcgttacattccacagtgtcctctttatggacaatcctgggagtaatttctgtcttgtattagtaacaagaacggttgtgcctctcctgggcaatagtctatttgtgcttttgtctcccaaatattggatgatgagcaactgatcacactttacagtaggtagaaatgtgttttcttccctgctttctgaaaatgtattcccaagggtcttgaaactttctaaaagatattttccattttgtgttttcattttataataatctttttgaaaatgatataagcaagttctaggatagtgatcagcaaattttttctataaaaggactagatagtaaatattttaggttttgtggaccacgtgcatctctatcatatatatattttttgaaccatttaaaattttaaaaactgttcttgactcatggagtcaaggagtatacaagacttgacccacaggccgcagtttactgattcctgttggagaatcactggatgacctcttatttctgaaatctgccgggtgattatagggtcttcacacctgtgtttgtactgatgtttgttttggtaccgagttgtactgtttgcgctgacatgaggtaatgagaaaataaagaaggttagcattaactataaaagacatgtttggtctaagtgaagtccaagatgtcacaaaggcaactctacaaacgaggatttcaagttgttcaaaaggtagtgagagaactaactcagcatgcagcccatagccagggaagaaccaggtaaactcacaaggatgtgagtttgttccatatggagtagaattctgttccatattcacactgtgagggtcaatttcatttcagcaaaacagcagcatttatcatattaaacacgtgttgttagtttaaaatcaactggcttagtaaccatgtttatgtttaacttgttagtctgattttgccgtatagctgtatgagaacattgcagactgcacaaccatgctccttgcttcaaaacccgattctgccacttccggtctaggtgccacatgtaagtcacttaagattaatgaattctatttataaagctattagaatagatcatgctaccattgccatacactttgttcatttatacatatttaaatgtcttaacaaaactaatctgaaaacatgaggaagggaatcaagagaaaattgtacatttaaaaagcttccatacatttctcaaggttgacaaaaactagaggttattgggatatgcattttatcctctttcctcagttcttatttatttcaaggcttgcttttattcttttttgcacaatttcttaccctttaacgtcctgcctcccccctacacaaacgtccatctgccctgtgacagatgtgtttcaatttttaaacttatttttagataacaaaaataaatcatggtcaaggtaacaaataagagtgcagatagtagatctcttccgcatcctaactcctctttccagtcctctccccaaaggatggcactaggaatattttcttgtttccttctggaaagccttgaattttgctccatttgaaaaaatactaccatcttttttgtgtttcaaaattactatgcgtctttcaaggaactaagtgggctaattataaaaatacagtggtttttcgtgtgacacagagggacagagaaccctaagaaaaaaacccaagcttgatgtagagtggcaatgaaagaggagggagagaattgctttgtgaaaggctcccagaggttcgagagagcatggtcactcaggaaatacatgtctttacttattaccagagagtagggtaggacaagcttgtagtctgaagggagggagaaaggcgaggcgaggtaagataaagctagagaaggaggcaaacggcagaaccctggtagattctgaagtcataactttttattttatccagaatacactgaacagccaatattgaatgttaagcatgagaatggtacaatcagagctgcaaatggagaagataaactctggaggctgagaggtcagtttagagcctgttgcagggtctgagcgagctgtgatgagatatgatggggccacgagtcacaaccccatctccagcgtctctgactcattagatctggtacgaagcccaagaatttgatttctaacaagctccaggggatgtggaccctgctggtccagagaccacactttgagaaacacttggttaaagaaacgatagtaaaaatgtaaaaaaccaaaagcaagtttggatgctcagtagatagaacaagtgggaatgaacagagtggaaggatcagggctgagtcccgggatctgactgcaacatgcagtcactgaggtagggaagagaggaggaagaatgtttgccaaagacaagtaatgcctgacctcggggaactgttgatcatgggggattatcatgcacgcagggggattactgagatggcagatcattgcatttgtaagtaagaagagatgtctagactaataatagagttcaagggctcattataacataaggaacagaagtcacatggatgacaatagagagaatgtgaaaatgaaaagatatgaacgttctgaagggagctggaggtagcactaacagagatgttctgaatgagataatattaattctttaaaactgtgctcacaatagagactatatagccttcctttttctgcttaaaatagatggatgtagaatctaatatgtttgtgaaatcaattagctaattactgaagacctacatagttcataaaaatagttttcaaaggaagaaactgagtcaaagggaaactggcttaagtgactgactgaagtcatttccaagccgtaagaataacttgttacttaaagaaaatttgtcatcaatacctcgaaaattgtaattgggaaaagttgggatactaagaatgtctatgaatagagatatggataaacaaatacacaactctgagaatcaatgagctagatccatatgtggatgcatgtgtgatccaaaaatgtttagtgaaaaacagcaagtttcagattatatgcatcatgatacagtttatacaaaaatcacaaaagcaaaactatatattttatctgagattttttgccaagttttcttcaccctgattattttattacaaaatatatcacatattttttaaagtgtataaacatgtgtacaatttaatgaatagcaatataacaaacacccctctacccactatccagcttaggaaagagaacatcattgacccgtctccaggctcactccttccctcacaccagaagtaaacactatcctggactttgtgttattattacctttgttttctttatattttcataacatatgtatatatatactaaacaatatacagttactttttcatattttaaactttaaacagaatcagaatgtgatcttatttggaaatagggagattgcagatataattagttaagatgaggttatatcagaatagggtggcgcctaattcaatatgactggtgtcattataaaaaggagaaatttggacccagagacaagaaagcgcacagagagcactccatgtgaagaaatacagggagaagacaaccatctactagccaggcaatatctaaggacgccagaagctaggagagaggtgtggaactcttccttccctggtgccttcagagggagcacagcacagtcgacttcttgattatggacttccagtctacagaactgtgagacaataaatttctgtttttcgaatccacccagtttgtggcactttattagaggagccctaggaaactaaaacatgtgtaaagcaatccattcatttttgttgctgtatggtattccgttaatgcatataccacagttgtttgtctttctgtcaatgcacgtgacagaaattttacactgttttgctcttattacttatggtactgtaaaaattcttgtacaactctcctggtgcacatgagtaagactatatctagagtatctgcctaggaaaaaagatatgctggctcatggggtttgcacattttacttgacaagttggagtggtttccaaagaaatagtggtagcatacaatacagctgcagaatataaatattcctgttggtccacgtcctacccaactttgcctgcaatactttatatttcctacaagaacatataaattaaaaggtattaaatggtctggaaagatatgtagcaaacataaaatgttggtcacctctaaagaagggagatgagtatcataactggagttggggataatgagaagtgaataaagaaatgagaaaggaagagatagggggacagagaagtagtcaaggagggagggagagagggagagttgggggagggaaggaaaacagaaatgaaggaaggagggaaagccggaggagaggaaggaaggaatcaaagaaggaatggagggagagaaaaaagaatgaaaaagagagagggggaagagagagagggcgaggggagagaaagagaaagaaagaataaaagatagaaagaaagaggggatattgtttacccaaaaagccagggtgcagactgactagcagtatgtatatccatgcaggaatcagtttgcatactgtcccttcagctacttgcagatgccatgaaatgtctggctttgggccaccaaatcttttctcttcttcctcaggaacaaagctttatgttgagctaaggtgtgttaatttgccctctccgagtctaataagcaaaacccagaggccagggatctcacttccccaaagacgtgagatttgtctaactggtatggcggacatcagcacagctgggaaaaattatttgacagcaaagcctaagcaggtgcttgtttgcttcccacctcttcagggaaaagaaaaaaaaaacttaattaattgacctgggacactgtatttggcacttccgggcatgatagtcattggatatctggaaaactatgaggaaatttcaataagcctgtgagacagccaaaatgattaggctgaaatgctgtcatctactgccttcattttaaaatatgggcaatacctacaacttttcataaggcccaccaagttttctaagtgagccacaaaactacatattgaattgttttaaggtttcccaacttgcagagtatctacattatctgtatttgatggtgtttggagagagtgggtgatattacattgcagtctcctaataacatatcttcaggatttgggtcatgaaattgccttgtaagttaaaaactcctgataaagcttagagtctggtccattataggcacttaatgaatgcattcagaaatgaatgaatgaacaaatgaatataaaataatgaacaaaaattctttgggtaggttcctaaccatgctgtttagtttgctatggctgcataacaaattatcacaaatttaggggttaaaaacagcactcacttattaattgacagttgtgtgggttagaagtccagcacagcatgtctgagttctctgctaggggagtcacgaagccaaaatccaaggcaaagccataatgagctaggctgagttcttttctggaaaacccactttcaagatcattcttgctgttggcagacttcagttccttgcagttatattactgagtttcaaatctccttgctaagtgacaaccagggacttctctcaactcctagaactctgtatacattctttgccatctatccgcctctatccttaagccaggaatggtgattcaaacttttcctgcttgccatttctggcttcttcttccaacggccagaggaagctctctgcttttaaagggttcatgtgattaggtcaggctcaccaagataatctccctattttatggtcaactggtcaactgtgccatataacactacctaatcatagcgtaaagtccatcaaattcatgcagagcatgtacacaagggggcaggaaatcttgggggccatgttggaatcctttgtaccacaccatcgaagactctgctgctgtgaactccagggtgcaccactctactgccctctcctagggcagaatttcatgtttccaagcatgcttgattattatgttggaagaccccagggttcaaatccaatagatcattttgttttccttttgtgatttgtaaaaatatattttctaaacttgcttctatgtactaaaatagcttctacagcagatagaaaaatcttattacttctctccattaaatgagtggaatacaagtataaacaaaaacagaaaatatccctctagaaaaatccagtaacattgcaacccctttcacatggtagcactaaaattgaattgttatattcattgtaaaggttggcaaaggaaacaatattatgcaacagagagccagctagggtgagagagcttgccctcatatcttccttattggagcaatagatgtcatctcttgacttattcaagcgaaatggaaattatagaactgttgtttagttcagaattttgcatttgcacaaagcactgggttctttgaagtactggggtcctaaactttggggagtttatttcttaattatttccatctttcctgtttactctgcagcttaaagtttccaacacagaaataattattttagttcatagaaatgggaaaagaaagtaataaaaatgctttgtctccttttacagaaaaatacacagtagtctccctttatctgtggtttcactttctgaggtttcatttaccctgggtcaaccaaggtaggaaaatattaaatggtaaattctagaaataaacaatttacaaattttaaatcgcatgttgttttgagtagcatgatgaaatctcatgccgtcctgctccatcctgctcaggaagtaaatcatccttttctccacactgtatgggctccccctatgcttagtcacttagcagccatcttgggtatcagaccaactgtcagtatcacagtgcttatgtttgagtcacccttattttacttaaataatggccccaaagcaccagtgtattgatgctagcaatttggatatgtcaaagggaacccataaactgcttcctttaagggaaaaggtgaaagttttctacttaatgaggaaagaaaatgttgtattctggggttgctgagatccacagtaagaatgaatcttctgtctgtgaaatggtgaagaaggataaataaatttgtgctagttttgctgttgcacctcaaagatgtatgtatagggaaaaacttagtatgtagggttcggtattgtttgcagtttcagaccccccacctggggtcttggaacatatcccctgtggataaagggagactactgtacatatagttaagctttaccagatgttatcatcatacaagataaagatttaggcagggtcagttcctatgtgttcccccagcactcagtgtttggtccgctaggccagcatgttacgcacactgcttcctataggccagcaacactataaagtattattactgaaagatgtagtttaagaatcagttctggttccttccagctggatcacattagacaagtgattggctactccaaaatacagaatgtttaagagtcagagtaaatatcaaattaataaagattcattagaatgaaattttcactagttgaatgagaaaatatgttcttggcagtaagctggtaaattttatctcaagagaagtaatctttaaaatcaaaggggaaaaacacctaatacaaattgctagtctttattttgagatctttgcatgtatttaccatttaattcaattctcacaagttgatgatgtaggtgctattatactaagatattgtagtttttagtaatgcatatgtatgagggtaattcaaaggatcaatcttttttctacatgtatttttacaatgtcgttattgatttatgggacattagtttaaaggctgatataattttcttctgtgatcttgtgacctcagtccatttgtgaatcatcttgtggaaaataaaaagaagaacaacttcaacagagagagtagtaaaatatgacaaagaactaacatttattggtcacttgcaatggataaacactgtgacaagcgctttattaatactacctcatttaatttttatagtaacagtattattttgatttcacctaaagaactttagggttataggacaggctattttagggatagttgataattatataacaattaattagtagatactatgaaactagcatgctgggctgagaacacccaaaagacagaatcaaatgaaattttataatttgtcaaaaatttttctcgaatttgtgaaattagacacactggcttgagtcactcggtcaagaatactaaagctatgactcagagaaagactgcattactatcaataataattaaaaataattaaataaaaaaattagaatggaaactaggacatagttactgatagtaatgaaaagaatcttcttaagaactgctacattatttagcactaaggactttaaacatattttaacagatctgtatctactttattttcacagccacactctgagtaattattgatgactcatttcatagaagacacaaagaagttatctccccaacatcacagttaataagatcttgcttttgttctatcttcccataaacaagccgcctcttgccttgataattcaacagctgaccactaacagaattcagacaatctcattctctactcagcgtgtgtgcgtaagttacaggagaagtgttttctctttttttgtagtctttgccaaaagtcatcacaatgagctggtttaacttaaagctcagcctggttgattttaagctggcgagtcttttccacaaggctcaaataccagaaggtattttcaagaagttaccaccaggttcctactttcccgaggatccacattaaccaaatccagtcttaatgccttgtgacacaactgatgccttctcaagttttttaaagaactttttgaggaaatgaaaattagatgtcccactgagaaaatgtgcacatcaatgttgtatgttgttagatcatgtaaatactagcatatgatattcaaagtgttgttctgatggatctaagccacatctttccagtttatatgccaatgacacattaatacatgtgcagcttaagcaatttttttttggcaaatatctgcataacccaaacaaagataaagaaatagagctctaccagaatccagaggtcctcaatgacacatctttctattcgtcttagatattcagtgtcctaactttcatgatgagcacttcctttctttgatttacagttcagcatccaaagtatacattcatagacaatgtggttattattgcctgtgttttatttttatataaatgtaattaagcagtgtgtaattttgttgggtttattgaggtataattgacacacaataaaccacacatctttagagtgtatagtttgaaagttttgacatatgtatactcccacccatgaaatcatctccaaaataaatatgatgaagtaggcatcactctcaaaaatttcctcatgcgtgtttaatatttccctagtgtcctatcctgccaactccattcacaggcaactactgatttgcattatgtcagtacggactaatttgcattttctaatgttttataaacttagaatctggatttttcactaaaactgtcttttgagaatcatctacattgttgtgtatatcagtagttcatttctttgtgttgctgagtactactccattgtaggcatataccataatttgtttatctactcatctgttgacagacatttggaacttttccagttaaaggatattacaaataatgctactgcgaactttcatttactggactttgtatggacaaaagctattttctcttgggtaaatgtgtataaattcagtgactggaacatagggttggtatatatttaacattttaagatattgccaaactatattttaaaaatgattctactcgttttcattactattagtagcatgtgagagttttagttgctccccatcctgaccaacatttggattatttaggtcaagttagttgtagtgttgtttaagtattctatagcctaatgaatttctttctatattttctgtcagtcattgaaatagggatgttgaactccttgactataatttctatatatctgtttctctttgcaattttatcagattttgcttaatatattttgaaactatattattacgtgcttaaatgtttaagattgttgtgtgctcttgatgaaattacccctcgtcagtataaaaggagtatcttcatcatgcgcaatgttatttgctttgctatctatttcatcagatattagcaacttcaattttcttttgactaatgctacatggtagaactctcttacacttttacttttagtacatgtgtgtctctatatttaaagtaagttggtagcatatatttaggtcttctttttttgccagcccaataatttttgcctttcatttgtggtgtttataccgttgacatatgagaaggttattgatatgattgggtttaaacatagcaccttgatgtttgttttttctatcatctgttcttcattttttcccctattttttgtgattcatttgcattaacttagtaatttttattatttaattttatttccttctggtttatcagttgtattagtcagggttctgcagagaaacagagccaataggatgtgcatatatatatatattagagagagagagagcgcgaaatttattcaaagaattggctcacacaactgtggagtctggcaagttcaaaatctacagggtagactggcaggctggagatccagggaagaattgaagtttgagtccaaaggtggtttgttggcagaatccaatctctctcacgggcagtccatgtttttcataatgccttcaactgattgcataaggacctctcatgttatagaagacgatctgcttttcttaaagtctactaatttaaattttaattccagtcaaaaattaccttcaaagaaacatatagaacagtgtttgaccaaatatctgagtaccgtggcctagccacgttgacacacaaagttaaccatcaggttaattatcaagttttattgtgttagtcatagttctgtggtttagtgtttgctttcgggtttatagcacacatctttaactcattacagtggtattctttttcttcgcatatagtaaagacatcttacaacagttcactcccatttctccgctcctggcttctgtgttgttttcatatgttttgtttttacatatggtatttgtgtattaagtctttttatttatccatgtagttaccactttcattgctcttcattctttatgtagaaacaagtttctattgatatcatttttcttctgattgacttccttcaacagttcttatagtacaggtatgccactgctgatgtctctcagctcctgatgtctacaaatgtctttattttgcctttatttttgaaaaagtctggctgcataaaaaattctaagttaacttttttcccaagaattttaaagattttgcccccttgtcttctaacttgcattgtttgtgatgagaaatctgttgccatccctgtagtcattcctgagaataacatgtctttttctgctggcaccctaacttctttcattctaagaatcttttacaaacagaactgagaatgagacatagatttattttccagtccaattagttctggcctctccctttcttctgtaaattctacttgcaaaataaaccatcttcagttggctgatctctccctttccttcctctgtcttaggcagctaaaagaattcaaatggcattgcaatacttttacctgtaaaccaacttgccaagttctatatgttctttagatgtattgtctatcctccaagttactgcagatgacagctttcctatttttccatcaactgaagcggtgttcttattgctttaacttctcttaacagttttttcaccattttccaaaattttgctattcttcactgcttttccaccttctacctgccacgttgtccaaaagcagatgtcacatattttaagttttgttacagcagcaccccacttctcggtgtcaatttctgcctaaattagcttttgctgtataacaaatcaccccagtatttaggggctaactactcgagcatttatttagcccatgattttgtgagtcacctgagcaggtctgcttttcatggctcagctgacatctgcattgttcgttcatgtatctatgtcagctggaacctggatgatctaggatagtgtctctttctctcagccggaaaaactagcctgtactttttcacttgacaatagtagcagatgttttacgagcagcagaagagggcaaaacttagtgcactagaactattcaagcatatgattacagcagctttgtgattggccaaagtaagtcaaatggccaagcccagcaaagatgtgaaagggactttcaaaggcacagatttaggaagaagaaggatttgtagccatttttggcaatctaatgcttatgattagtgctactttaaagtcatgaaaatgttttccttcatcaccttaaaaaagtttgttttgcctttactatctggaatgtcttttattttcttagtccgtgaacatgttcattttccttgttcctcctatatttgttatctaagacaaatttttaatatgaactctggatctgttacagatttcttagactataaaaatggtacaaatctaagaaaatgttggcaatagttactgaaagatatgattctggagctagtatagtagtgttttagcaacagatttttttaacatgaggaaataaaccttgttgaggtgttcttcaagagatgaggtttgggggaatgggggctcctttcctctttttccaccttggggaacagctctgtgattgcactagacagatagcatctgtctacctcatctaggtggaaaacaacaataacacatgtagaagttttgtttgtttgtttgacttgggaattgaatatgaaaatgaatggattctttgagaagaaccaaatgcacactgtagagggaagcctgaatgcatggcttattgttcactaactgaagtcttgatggaaacgaaacattttacccaatgactaggaaactctcatatcaactccctctttctcctcactatggaactcttaatttaaatccctaatttttcatggctgagaaaaaatatttttcaatttctatttactctcaattcaccagctaattactaaattatcttctgggtatctctttttcctcttcttgataactactctgggctttttctttttcatttttctttttttttttttcactcagagtcttataactatttaaggaggattcatagtctttgtttatgcacttgttcaaagttctctctgagtgcataaactatttatagactacattgttttggagtctttactttccctcaatatcctctatgagatgctgaattccaacatgatctactgtgctgggactgccttctctgttttctcggagctgagtttccctcagaggatctaagtcctgtgtgttccctgctcatcttctaccacgaactacaatgatagggtcgatgaaattctgctccttttggagaaaagatagtttgttgggaatccaagatattcttcattacatagaaaaacagcaatcatgacgtgtgctggataatatttttaagtattttgtctgatgctcttcatttttttttatttttaacacatttccgtcatcatgtggattatatcttcgtgtatttatatgcacatctcttcccttgtctctcatagttcatagctccttcagtaattcattcaaaatacttactagtttgttacttattaggcactataacatacttaacacaggcaggaacacagcaatgaacatgatatacgaaacacttcctttcgccatggagcttccagtctagtgagatatatatgcctcctcatcatggaggaatatatatgtaaatgagctatcacaatacccaatgaaaactgtttaagggaagaataaaatactgtgaaaggaagtatgtagaaaaatccctataaataagggggaaaaaactatcattttacagaatagcccattttaagatataaccagatattaaaacctttttaagacagtgtaaccaaatactcaaacaattatctcacagttgctttcaaaagaaaacaaaatcccaagtgagcatttccattaaaaacaaattatactggaaaggaaagtgaatgatttttaaacaattttaacattgtaaacataaaggtgaataataactaacattcattcaactactaatgacctaaatgctcaaaaatcaataaaatgttcttattgattcaacaggaattacagtttgggtagcaaattaatcattacataatagtcttacactaaaacaaagcacattgaaaaaaatgtctgtacataaagatatatacttatctactttcatttcaaaagggtttttcactaaacacttatttaatggtgctataaaataaaatcaatatgagaagagcaggagaaaaagtctaaaaagaaaattaaattgcagacagaaaagaaaattaaatttcagacagaaaagaaaatctttaaaaagcatcagaaatataatacagtagttaatactcttgtataacattcccagacagtaacaccaaagtgctcaaataaaccattgtcatctaaataaaactgtccaaaaagtgaattgctggtagcaaattggttggaagatgtaagcatttgaaagggaatttttagatgtaaatgccattattattatgaaacatgaaaccaacctttccagatacaaaatgtgataaaagatagatattacaacttgatcatttcaagttacgtgtatctaaactgtctacctatatgttcacatttcaaaagggcctctttgccaattgcacaataagcagatctctagaacctgaccccttacattgagcctctaagcagtatttatgcctataaatatttgtccttaaaaataacttacaagtgtacggcatcttataggttgcaaaatatttatacttcttttcagctaccctgtcttgtagatgggcatgtattattaggtccaccttagttgagagaaaacagatgctaccatagtaagggaattgtccaaagccatataacagacagggaaagacaaagagctataatctaggtctcctgacttctaatgcaacagttgtttctctccaccacatgatacctcttcttgcaactcatccactatatccccagtatgaaaaatcacttgcaagaaattgccaatgactggacatactagaaacccacattgtaagttctagatgagcaggaaatagttgtttgcttttttttttatttttgcaactttcataaggaaacatcatagaaacttaccaaggtaagttagttgatggtggtgatgattttattctttttataataacacttctatctatttctaacaacaaattcattcatgttcattatagaaaaatggaaaaatatgaaagactataatgaagaaaattaaaaatcactaattacattttatcatttattgtgattttcttcagaccagcaaaagtcttggcatttttatcaaactcatccaaaactcacattaatataaaatatattaccgtcactgggctctgaaattttctcgctcaatttagaaccagggtatcttgagaattgtacatgttatcagatcaacttctattaatctgaattaattgccagatatatcaacagagatcatcccagatattgctgctgaacagcatcgcttctccatccgggaaggctaataccagcttcctaagtggtttctacacagctgtttaagaagtgagtagattataaatccattcccaagattggcagcagcaaagaagcacagtatcaggaaaagcaaagagggaagtgctagtcattaatctgtagaggaagcaatgtgcattcacacagttgttcctacctatgtctccagcttcatgaactgacgccaaccttgctccttctccctgcctgacttctgcctcttcctcagtcctaaccttctgttgatgtgggatgctttgctagctcttctttaaggctgagaaacagatgctaggacagtagttcaatgggttcctttctaccaagtatatcttttcctgttgatatatacccccagagtctgtggagcaggagtggggaaacatgcagaaaatactatttgcctttgcaggtgcttgctcctcatcctggaatgcctttcccttatttcaaaatctggtaaattcctaacaaatcttcaggcattgtcttccttacaaatctttcccagcctcccagttcttaatcttcccctccccagtaaagtgtgaacccttctcccaagctggaccataatgcacacatcacactgttttataatgattcatttatgcatctttcctccccactggattgtgagcccattgagagcaagaaatgtgccttactcatttttatatccctgtgcccagcatacacaccctactcattgaataactttgtgtgggataaatgattgtggaatgaaagaaccaaataaagaagaaagtcagaaaaacgaaggaaagaaggtaggaaaaaaggaaaagaaggaggaatttttctttaataattcaaactacctctagactcagagttccaatcttgtagaataagtcgtcctaaatttgactattcaggtagtctaaaaaccacaaacataaagaacataatttcccaccatgacttgtatacgtgaagaagaaggaagaggattttaaacctgacaaccttgtttttcttcattgatgtcttttgctgcgtggtttagtggaacaaacttgggctgagagaaataagggaactttattcctgctctgtcaggatacgaccttgagcaaatcatttgacatctcttgcctcagtttccccagattaaaaataagatacttgaacataatgagcctttctaactcaagcaaactaatgttctgggaataattgtgagttatttaaacatcaaactggacaggaatcaggaattctactttggggtgactaaaatgaaaataatgaaaccatttaggagagagaactttctactattttaggacacaagtgttttaatgtgagttgtatcacctgctaaatgtgaagagtgaagtggagaatcgctatgatgatgacgcctcagagggtcccctgacatgcaccaaggagcaaatggcaggaactgggcctgcctttttctcagctatagtgcctagctcagtgccaaacatatggcagacttctcaataaaaaaaaaaaaaaaaaaaaaaaaagtcttaatggaatggatccttcgtggtttccgaatagtagcactcagtctttttaaattagcagataatgtaaggaattaagaggtatctgaattgtaattattacataatctttttttatgtagtcctcactgttcatattgacacattatatttctttatgcctaattcagagttctaccacactttgctcatcaaaaaagtttatcaaataatgtaattactagacggcaaggagaagtcaattcaaagtgttcatcttcttcatttatatatgcctggcttacagtaggggtttaatagagatctgttgaatagatttgatctgaatgagtaagaacacctgtgaaattgaaatttcttgacatttcaaatggtcctgcagattaatttgttttttgggttgtttttccgtatcatctcagcttcctgctggtcttcgaaataattctctaaagctcaaacgcttatagttgtgaaaataaagttcataagataaactaatatatcatttcctgtgcctggggtcatagattgaaacaataactaagaaaaatgtgaagtctctcttattcatctgattgttatctcctgaagcaccaaaacacgcaaataggagagacaggggactacatttattcctttctagtcattctgtaaagaacaaaaaactggggacaaaatgccgtcctagtatgattcggatattttgaaatatacgtaataaaaaactaattcaaaatattttttaaaacaatttttttagagaagtgtaaggttcgcaacaaaattgaaaggaaggtacagagatttcccatatacttcctgcccccacacatgcagagcccccccgttatcagcatcactcataagaatggtgcgacccagtggtgcagcggttaagtttgcacgttccgcttctcggcggcctggggtttgcgggttcagatcccaggtgcacccagttcagatcccgggtgtggacatggcaccacttggcatgccatgctgtggtagatgtcccacacctagaggaagtatgggcacgatgttagctcagggccaggcttcctcagcaagaagaggaggactggcagtagttagctcagggctaatcttcctcaaaaattaataataaaaaaagaatggtgcgtttgttaccaaggatgaacctagatcataatcacccaaagtccatcgtttattttagggtgcacttttggtgttgtacatctatgggtttggtcaaatgtataataacatatatttatcacgataataacataaagagtattttcaatgccctaaaaattctctatgttctgtctttttatctcttctcctccacccacctctgccaaacactgatctttttactgtctccatagttttgccttttccagaatgtcatatagttggagtcatacagcatggagccttttcagattgacgtctttcacttagtaatatgcatttaagcttcctccatgtcttttcatggcttgatgacccatttcttttttagcattgaataatattctattgtctggatgtaccacaatttatttgtccattcgcccactgaaagacatcttggttgcttccaagttttggtgattatgaataagctgctataaatatttgtgtgcaggcttttgtgtggacatcagttttcctctcctttgggtaaataccatgaagcatgattgctgaatggtatggtaagagtatggttagttttggaagaacccactaaaccgtcttccaaagtggctgtaccattttgcatttccaccagcaatatatgagagttcctgttgtccgacatccttgtcagcatttggtgttgtcagtgttccagattttggccattgtaataggtatgtagtggtatctcattgttgttttagtttgcatttctctggtgacgtatgacatggagtgtctttttatatgcttatttgccacctgtatgtcttctttggtgaagtatccattaaaatctttgaccctttttaaaatcaggttgtttgtttccctatggttgagttttaagtgttctttgggtattttagacacaagtcctttttcagatgtgtcttttgcaaatattttctcctagtttggggtttgccttttaattctcttgaccttgtcttttgcagagcagaagtttttaattttaatgaagtccagcttatcaattacttattttatggatcacgtctttggtgttgtatctaaaaagacctctccatacccaaggtcatcaaggttttctcctatgtttttctaggagttttatagttttgtgttttacatttaagtctatgatgcatcttgagttagtttttgtgaagagtgtaaggtctgtgtctagattcaactttttgtatgcagatgttcagttgttacagaatcatttgttgaagggactatttttgctccattgaattgcctttactcctttgtcaaagatcagttgactatatttataagggtccatttctgggctctctaaattctttccgtcgatctgtttgtctattcttttgtcaatgccacactgtcttgattactgtagctttgtaagaagcctagaagtaaggtagtatcagtcttccaactttgttcttctccttcctgttggctattctaagtcttttgcttctccatataaactttagaatcggtctgctaatatccataaaataacttgctggaattttgattgagattgcattgaactatagatcaagttggaaagaaccaacatcttgacgatattgaatcttcgtatctgtgaacaatgaatatctctccatttgcttagttaatctttgacttcattcatcagatttttgtaattttcctcatttagatcttgtaaatattttattagatttatacctaaatatttaattttggaggatgctaatgtaaatgctattgcatttttaatttcaaattccactttttcaattgttggtatataggaaagcaatcaacttttgtatattaacctgtatcttgcaaaattgcgtattagttctaggaattttttggttgactcttttggattttgtacataaacaatcatgtcagctaagaacaaagacggttttatgtcttccttcccaatctgtatttccttttcttgccttattacacaatttcttgtccatatggcataattcaaagtatcttaaattaaaatttaagaattttattggctcacataactaggaaagagaaatacttatagcatcaggctcagctggatcaggactccaacaataccatcaggattccctctcttccaccctccctctctcaggcctgttatctccagcaaggaaggatctggctttagtcgcatgatatacctaaaccaatcactgtgacctgggggacggagaattgttcttggacaagaccgcaacactgacctagccctgtggccagggaaaatggtgggtattagaattgaaagctccactagtatcttgtgaaatgggagattggcgtgtcctaaagcaaataagagagcaaaacagaacaaggtcctggagatctagaattagggtctctcatgctgtcacctccagagtcactatctcatactcattcaagactttgatccccgactgaaaaatcctcttgattcacgggcctgaaaacaatatccatgaagctgaccatcaggcaccacctgagcttcagtgtttcttgactttttaaatgccattattttcttttccactctacttttcacactgatgggcacaacttggacctcatcactacctgaaagtgctcaactccttaaatcttaaattagcctcaccctttctaccacaacttcccatctattcatactgtcttgggccctatctcccactataccctgctcattaattttacaaaccataattttgttatcaccagcctttcctctagtcttaccagttccatattaatccatactgcatggcttgatcacccaaaacacctcttgagcatccctactcccttactcttgttctatgatgctatctatattaatttcctagggctgctgtaacaaaatgccacaaactgtgtgggttaaaacaagaggagtttttctctcatggtctggaggccaaaagcctgaaattgacaatactgagccaaaatcaaggtgttggcaggactatgctctctccagaggctctaggagaaaatctgttcatgcctcttccagcttctggtggtgccagcattccttggcttgtgactacatcactccaattatgaagaccagcatcttcaaagctctctctgcttcatcttcatattgcctcctcctctgtgtggaggcaatctctctgtctctctcttatagagacatttgtgacggcatttagggcccacctggaaaatctccctacctcaagatacttaaattaaattaatcacaactgcaaaatataaggaaatatttgcagtttccaaggattagggtatggatatattttaggggtccattttttagcctatcacaatacccatatggcaaaaagccaactctggagttacccaataatcttcactcctctactttgctgaaaagagaaaaacagatgcataattgtcactattaattcacaattttcacacccaatttgacagtcctgttactttcccatgatcaaatgtctctccatctacccttagctacagttagatacctttacatcctgcgaagctctcctgattccatcaataaatgcatctacagaaacatctgttctcccacagagttatggacagaaggattttgtctgtcttcttccatcactaccacactctcaactcttagaacatgctttagtgcaaagttggcccttgattcatatttatttactgccttattctttccagcataaagaaaaaggacgctccatttccctctgttcttcatcccatcccctctgatatcttgctccttctctaccctaggtctctagtttctcccccaccctctctctgggctgcttctttatatcctctaaacctactcaagtctctttcacacttaacaaaatgcataagaagacatactcactccaaaccatcacagacaacaacctttacacaaatacacagtcctctctaagtattggtcattgttatactcgccttatacaattcataaaagaatggtctaaatttagtctataatctctcacctccaactcaatacccagctattggcttctgccccaccatgtcatttaaaccattcttccatagggcacaactgttttttcatggatcagtgtttttttaacaattaaactttttattttgagacaactgtagatttacatgcagttgagttacaacagtgcaaagaggtccccacgtacccttttctcttcataataacatcttgtaaaactatagtacattatcataatcaggatattgacattgatgatatccatccatcttattccaatttccccaattttccttgtactcatttgtgtatgtgtcaaactacctttccttcacaaatctattgactacatttcaggcttgacattaattaattgcttgatttaaatatagtaaacatatttagtgcatactatgagccatagatctatctaaggttttacaaatactggccaatgctatctttatattaattgtataggacaagtatactcctattagccccattttacagatgaggcaactgagacacagagaagttaggaaatttgcccaaggcaacacagctagtttgaataatagagtctggattcaagcccatgcagtctggttccagagcttatgtttttaactcttcctcctcatgacctctctggacctaactgaactctctgctgaatttggggctggaggccatgagctccttgaaggtctcgttttccttatttcctttgatgttacaatctattgcttctccttgtccctccctgactactcctttttagtcttcttcatggaccactcatcctctccccatcacctaaacgttgctattcctaaggctatatattcagcttcctgatttttttaactctgtgttttccttgagagagctctatacttctgtgcttaaggaacacaaacctatagctataagcttagacctcttatgtgagctccagactctctcttgattgttgactctccatctttcctggatgtctagcagatacttcaaacttcagtttgtcaaaaactgcactaatccatcctatgccttttccctgcaacacacaacggcccacgtccccctacaccccccaaagaaagacactttctttgtcagtgttctgatcttaaataatgatgcctccattcattcgtaattacactatcatggtcacaaaatggagaaataataatacaggtaataactgtgctccagctgattaatttatactccaaaataatatttggttcattttttattctgaactgatgagctggatttgtttgcttacagtgcctgacccagtggcataaattggaaaaatgcaaaattcaacatatttatggaaagatgtgacaaaccactttctgatgatagtatcaaggatatggttcttaaagaaggacaatagttgtgggaacaaaagtgtaattagaaacaacagataaaatatagtcattccaattctctttaaaaaagtgtcctggagcattgtaactaccagagaaagtgtttctcgtcttagtacgtatactgggctataaaaaagcaaagatgtctggaatattttgagaggttatgtagatgccaaactacccagacttctcatctcccaacaaagataacaagaaacagaaaacatgagttaaagctactgtgatttaaatccaaacaaaatctctttctgggaagcactgaggttaacaactgatgaaccacaaaatgaaaatatctgtgagatactgaagaacgtgcgttgttttcccttcattatgcggcaagaacataatgctgtagctttatgcttcactagacagagtaaaaattgttatcacaaacttatataatatgaattttgaagaggatctcttgctgattgaaataatgccttcaccatattcacaaataaatgtcttgaacattcacaagctctaaaaatgaaaaatgtgcagatgaaaatgaagagtaaaagtggtagagtttttgtgatttgttggttcttttacatgcctggactttctgaacatttttgagaagtcaaaattttgttatgttaaattaaatatatatgtatacgtatatgttatagttaacatattaaaacaggtaagcagagaagaataagagactactttgattttcaggataaacatatccatacaggcattagctacatctaataacttaccagccttccagccctccagaaggatcctagttcctcaaataatcatagaggccttattagcactttcagtagtatagaaatgcatcttaatcaactgcgccatgcacaagcaggcactgcagaagttattattattaatcattagccatagcaaagaaagatgcagaaataattcctacttgcacattaatagtcctgacttatttgcactgtgagccatgacaaagtgagcttattctgtgtgtgtgcttttactttttagttttgggagatgggagcaagagaatttaattctccactaggttggaactcttgtttagctgaaataaattcatacacacaaagaaaataatagctgctcagtggaaagcctccacaagagtgagatcacatctatgttttcccttctgtttgttcaggctacaggagaaagcctggtacagagtagatgctaaataatcatgtattgaataaacactttaccaggtcagaaatccagctctggcaggacaaatagaaaagagagggatattgatcgtgcagaaggtgatggagaatttgctgggctttttatgtaaagtatcccttaattctttccagagccctgtaaaacaggtatatcgttcctattatatgaatggtaaacacctcaatcctgaatggatctatcaggccttgaattactaacttggtctgaaactgtcactcccggcacgtttgccacctctttagtccttgaaccaatcccaggttttgtacatgccctggcctttcctccagctcttgctaacttccactcatccttcaggtctctgcttaaaagccacttaaatgtgacttccccagggaagtcttccttatcacccttcctgggttggattagttctctcacgcttcctttgcagcacgtatcacaactctaactgatgctctgtgcagctctttgttttatgcatgtcctctctgacagactctaaactccccatgggggcttcatctgtcctgttgagtgttttatcaccaacacttactacactcttgggcatatactatattttcaagaatatttgatgaataaatgaatgatgggaaaacccaggcttgcagaagttaaataatttattcaaagtcccaaaactagtatgtgatatgaatggattttaagtctgggcctgtcaaattccaaaggctaaacttagaacaataaataactaaggaaatggaagattggtttgggaccataaaaaccctctgagagtaaaaagcagatagtgtttaataaggacaagtacagtatcttctgtaagagacacaacaacaaaaactaaacaggttcataatgatccccccaccattacagaaataatccccatcttagttaataccagtattgcactaaatgttgtgtatggcttatctttatttaagcctcacaataaccccaacatcagtattgtcattattcctgtttaaaggtttaaaaccttccacaataatacagccaagcacacccaagcagtctgacttcagaacccacatgcacttaagaacaaattataaggttttcagactcaaacttaggcatttttgttgttgtcttgctaaattacttgtttccttagaactacaatctacagatttttggtcactaaaattgtgtggttcaaaaaagagattatagttttaagctgacttgctccaactatatcacccagaatgaaagagatgatagtctctgggtcccttcccctgaaatagttaagttttttacatacctaattttggaacgggagctcacagtcacctttcataaagggaaaatagatttctggaaagaaatccactcagacctgcaccaaggttagagaacgaacaactctcccagtaggaactggcaatcaagtttctcgctatcgtggaggacactgctgcccccatgtgccttaacattgtaacaaaacactctgagaatgaggccggttcatcctgtgatcatctgagctggagcagcactttgaaccgctctgctctgaggcagctgacagagaaacagggcccagggtctccttctgggccactctgctggcaaggcgatgagagcctggagtattgagggtcgaggcacaaccgtcatttcaggcagcttttgtgacccttgctaattgtttcctttagagaccaacctctgaagaatcactagaaggcaaaaaagggtagaaacgtctcaagtatttgcaacaaacagaatttaattaaacagaatgagcatcccttagacttatggccaagcttcagactcaggactgcccctagaaattgtagctcattgagaggcaaatatgtgagagaaagaccatttctctctccgaattggtaagaagaaagtggaagtaaaggaaaatgtaataaaatgtgtttagaactgggtttgaccatgtgctacactttcctcatgaaagcaaataatcttagaactggagatgctgtccttcatgtcctcacctgcaacatttgaattaatttatgtaaagaagttggcgccttcattctgttttgccctgatgggctttaatatgatgtttatttgtgtgactatttgaataatgcctgtctccatagactgtcagctccaaatgagtgggcatcatgttcatcagtctaggaatatttgttgaataaatgattaatgattttttgtgtgtgtgagttactagggttgaaaaacattggaataaaagttccccatgagtttattttctttcctgtagttatactcgcctttcagcctttcatggaggcagcttaagatataaaggctttgttgtcaaactcagattcaaatccccgtactactgctttgtatctgtctgatcctacagaagtttcctaaacctctctgagctcatttcttacacaacttgggataaaatatctaccttctctacttgttgtgaggacttaatgagaacactatttcctacacaacctggctcactggcccgcagaccatggcaatcattaaacgttagctttgttcatcctccaacctctacattccctcaaagcttctttgaatatatcttagaacagatttttcaaaaaatctggacgtagacaaatcaaatcaaccgcatatccacacatatcactgtcgtgtctagattatacttttttgtccagtacaagttccaccaaatttgttgcaaacagtaaagtgaactcattttcatttttccatttggcagagagatgtaataaaatgacaagagggttattgcttatgttaaggatggtttcgacttaggtaactgaaaaccaataactaaaaatggcttacacaatgaggcaaatgtatgatctcacataagacgtcaagagaagataggcacaatgaagtcaccaaagagccagaatctagccaatttcttaagtgagaaagttagacgagaaagaataagatttttgcaaagctccagaaaatatatcctcatacaactatgtatatgtctgcacgtgtacatgcatgtcatcatcttagtgttttattctttctgactgaaacattgcataattcccatgtatttttaattcagttgaggcttttttttcaatatcactaggttgatgtcatgccaatttgaatgtgatctaatcaattcacaaaatctgcaaaatgacctaggtaataaagagcagaaataaataaggacagggcagacctcactgtatggaataccactcatggcattcataagaagaatatttagttttgcagtcacctcttctcctgtacattgctgaacacgccttggcaggatatattcccttccaatctagttaaaatagggctctaaataatatactcaccaattgtggtgaaaatagtacagtatgtgtacaagtatgaatagtttctattgtttgatatacttgggaatgtaactatagaaaagactgttaatcagaaactgctatgaaaaccgaagtctgcccatattaagaagcagtggacagtggtaggcagatacctaaagatgggacacccaagattcctgtctccaaacactaattgaggtattgctgtgaagatattttgcagattaaagtcccaaatcagttgaacttaaaatacagagattatccttgagggtctgatccattcacatagccctttaaaagacaagggaggtcagagagaaccagagggagaaggacccaccaggcctttgctggtttgagggtggagaaagctgagagagaggtcccggctaatacccagtaaggtagcggtggccttaattctacaaccacaagaaattgaattctgccaacaatttgaaggagcttggaagaggacggcaaggatgagaaccaccgttggctgacatttgagagcagggaaggcagctaagccatgacaggctcttgtcccacagaactctgagataataaacttgtgttgtttgaaatcactaagtttgtggttcttcgttatgcaccaatagaaaactaatgcacaggtcctatctcagagctctgttgtctttttccccatatggttttgggtgcctatggaactaaactgtgttgtaattgacaaaatgaatcttgacaaaatgaaccctctcttcagcataaagttgggaaaatccttttttgaagactctttaaatcaaataaatttaaatgaatttcaataaagattcagggcttgggcctgatcccaagaagccttttccagcgaaattttggcaacttcatcctgcagaatcagcaaaagtgacttgaagagagaatgtgaaaagaaatcaacatgtgtaaagtgccaggcacagtgcatctttatatacatagtgtcaaagagttatcatttcttcactgtaaaatgctattacttttcatattttatagactgaaactcagaagcctgggacatttcaatgatctctttgttagtcataaagctggaacttgagcctttcttttaggctgtaaatctcctgtaatttccgtcttccataaaatcagagagcagaggtggagcgctttgccttgtaccttggagttcttcatcctgggtgaccttgggactttgtggggctcagaatatgtctacatcttcgcactcaagcagctgatttgaatcttgattatcacccagcactcatctctcttacaatatgatgtagggtagtctttctccacttttgcttgaaatttaaaattcatgtttaactactttggccccaggaaatgttcagggaatgcagaaagggcttaatgcaaattttggaagcagcaaattacccaacctgttggttgtacctagttgttaaagttttctttccatacatgctccattttaattttcatttgttttatttgcctgggatgtcagtatttcttcgaggtcatgttacagatgaagacatttagactaagagagaacaaatgacttgcttagggttcagacacctgggaacattagaacaaaaatttaacgttaattctagttcttagtgatcagtttttatgttagtttttaccttagtgattattttttatgctctgaaaactgaaggactaatcttattatttttaaatgagctttttatagcccaattgttgaaaacattaacgtttttaaaattgatgttgaattaagtgttttctcttgaccctggggtctctccttctgtgctcatatttataatagtcagttgtgagggtttgtgggtggaaccaagattttgatctcaaaagttcttggtaaccatttaatggtctctggtggtggcagggacacagatgtgataagagaaagtggtgactgtgaatggtacagcacaaagcaccacaaaggtaccctcagcacaatttgctactgaaaaacaggggaattacaggaaaaacattgttttggagctcatggagttctaaaaatttgcacacaagttttcaaggaaacggccagagcaagtttattttctaatttcttaaaagctaagaactagctaagtatttatccgttcaggataaacatttttaatactctctgttctaaacactgcggggctctaccaaggttagtctctgccttcaaggtattttccaagtctaaagggagcagagacatccacaacagaatctagtgacatcagcagtacgggtcatggctttgcgccctttaaattgtggaaaattcttctacagttgtagaatgacagagcatctttaaattgtcaagctagtaagagagtgacttttcagagcaaccccactttcaaacaagagaagtgaagagtggaaatttaatttaacagaacctatgttttcccaattagattaggtattaagcagggtagaataatatgtaaggacagtcatgctttccaattacaggtctctgagaacgaaaggctacatccatcaccgttagtgtatcaaagggttcacttcatctgtcttgtgaaagccatgctggctgcaagtggtggggtgttttgttttaatgatttaatcaactaattaatggaaaatataaaagaaaatctcaaagggtaaaatgctgtcttaactatgaaataattatactatatctcagcttcatatgttcaaaccttgaaaattaagaaaataaacagccagtctttctcaaatgttaaatgtatgcaaacagttatgatacatctgtagcaagtaacacaaaccacgcaaacatacaacttgttaatgcatccttctataaggagacttcttatctgattggggggcactctagacaccagaatcttaactataataattgggatgggttcgtgtgatatacataatggtaatttgaaagtagctttaaattatgactttgtaaaatagcaaataatcagtaaatagttggattcatactgaaaataagaacttcctagttcataactaaattcacttaggtataaacaaatatatacatatattacatacacagttaagttctcagatgaattttaaatatctcttcaccatgtaatcagtaaaaccacttagccattatggacaagaatgcattttctgtcctctcctggtgtatcagtcagaatattatttaataacagaatctcagtggctgcaaatgttaaaaggtgtatttcttcatactccatgtttatctctggtcagcaggggtgcttttctcactgatgtcactcaaggagtcctactgatggggcagccaccctctctcacaggattgccatgccaggaagaaaagcaggctctggcatatctggcatcagtaattaaatcctatgacccaaaagtgatgtgtgtctaaaaggcttccacaattcccaagaggaggttggattccctggggcagggcagagggcattgccataccaccaagcaattctcccagttgaatcctacaattcaactcagttctgccactatctacctggagatagcatcagatcccacaggttaagggctcagtcccacaagactgtcctccttttcagatgccaattgcaagcccaagttgttacctgtgtttctgaccaaccagctacagattggaggttcccacgaccccctccttgggtttaattaatttgctatggtggctcacagaactcaagaaactcattgactcactagattactggtttattataaaagaatacaactcagaaacatctagatgaagagatgtatagggcaagctgtgggaaaagggcaaggagcttccatgccgcctccaagtgtgccactttctctgcatctccacgtgttcaccaacccagaagctctctgaactctgtccttttgtgtttttatggagcttcagtacataggcatgagtgattaatcgttggacattggtgattgaacgcaacctccagccccaccccccgaagaggtcagagaagtgcgactgaaagctggctctcctggcaagcagcccccatccttaggtggggtcgaaaagtcacacatgaaaaaagacacctttatctctctaatcacttaggaagttccaatggttttaggagatttgtgccagaatcggagacaaagagcaaatacatatttctttttataaatcacagtattacaatgtcacttctgcttttcattcattgaacagagtttgtcacatagtcccaaccaatcattagggacccgggaaatgcaatctcctcttgtgttcagaagagggagaatttgttgataaatagctaccacacatgaactcttgttctccttgccttgtccaattcagctgtttcctcttggtgtatctcatgtgttattgctgcatcttcttctaagtgtccaggatgctttctggtctctgcttatgaacttgtacagagctcactttagtatgatctctaataatcgtactgtttaagaaggtaacttcttcaaagaagtaccaacttacctgtcgcctattcttaccagagaattgagtgctcatcttatttgggtcatgatgtgagtctcctcctttctcttctctgatctgagtgcccagtgtccagtcttcgtgtagttctgcccacactctacctgtgctacataggcgcaggcttcctttatcaggaagaatagtcattggacaaaacatgatgccaagacacttctgttctagaaacccaaggttttcagtttaagcccctcacaactagtgccgtgtatgcccttcttagcaacacggataggtgtgagagttgatgaaatacatagatgcttaaaagaggtagcattacagatatcataaaaggatccccaaggaactctttatttcacaagaatttttcgttttttcccatgatatttttgtattataattcttcttttgggattccgggagaggtatctctaaatgttcaataataattctgaacctaaggaggtgacatacacaagaacaggctaatttaaaggaagagaagatatcagccagtagagtggacaaatattatcaagaatatacatctgatttgcttaccactacaaccatttctagagcattccaccagagttctgacaactttcaagaaagcattgaaaggctttcttatgaggtaaaagcatagggactcaggaggcacctcaaaaaataatttctttagcaatttcccctgcatacatggatctctcttccaagcaccgttcctgaagcttttcctggactgctgtatttctaacatactcatccaagcattactgggggagaatttcctttaaattaatgaataaaaggctcctgggtttccactgacatttatttccactgtcgtggcctttattcttcccagctgccatttacaattgcagtattcctctgcctttgagtgtaaactctgatgatattagatagagtagattcaatttataatgctagagtaggagacataactcatatctggtttatagggtcattgcattatatcagacctgcactgtactgggtcaaccaccctgatgaatatcatttaaccctggtgtagctgcattgatgttacaatgactctttatatcatggagttctgcttacgaaattctcaattattactattgtactgacagctaatatttaatgagcaaatattatggataaaaagaaggctaggataataatataacatgcattatattattaattctcatagcaaccctctgggatcaatagttatccccatgttacaaagaacaatgagacttagactatgcaatttgtctgaagctatacagcttttaagtggcaaagcagaggttcaagcaaggtctttacttaactacagagcccaggagcataagaattttactatattactctaaatactacctggcagcacataccagctattgtatggacgtgaaggtgcttgtgatgtccatgcatcagcctagatctcaggaaacccagacacaaggtgtggctcagcagcccaccgtgtggtttatgggtaaattcctgtaacctcctcaatctcaagctcatcaagtttaaaatgaggccattgaactggcttacctctaaagttactttaacactcaagtttctggattctatgatcaataaactgtgcactgccattttcaaattatgggaatgtgggtagtttctaagttaatatacttatctataaaataaagataatgctggggctggccccgtggccgagtggttaagttcgcgcgctccgctgcaggcggcccagtgtttcatcggttcgaatcctggacgcggacatggcactgctcatcagaccacgctgatgcagcgtcccacatgccacaactagaagaacccacaacgaagagtacacaactatgtaccggggggctttggggagaaaaaggaaaaaataaaatctttaaaaaaaaaaaaataaaaaaaaaaaataaagataatgctagcatctatccattcacgtgagataatccacgtagagcatttaacacaatgctggaacgtagacagtgctcatatgtattagcttatcttcatcagtatcatcataaccatgttaatagttattataaaatatcacactttgtaaaatacagttatgcatcacatgacaaggatacagtctgagaaatgcgtcattaggaaatttcgtcactgtgcgaacatcatagagtgtgcttacacaaacctcgatggtatagcctactacacacctagctttgtggtagtaatcatatgggaccactgtcatgtatgcagtctgtcattgattgaaacattgttatgtggcacatgaccatacccataaagtattaatattagtagtagcaaagtattaattgtatacatttacaactgatcttgacactcacatgtatcatgacactacctgagaggactgaaaacaatcatcaggggacacatcagtaaggcccaaaaagggccaactgaccaatagatggtagctatgtgctaagaaaaatctcattccatatttattgcatcctgatcataccatggtgaggagattaagaagcaataaaggaaacccactggtcataacagattaatgtcccagccagcagactgccaggaccctctagttccttgacatttgatggagtagttcatttaacttgtcctaaaaaccagaaatttttccaaatcacttcactgtctaaccattcataatgagattaaagtatatgtggtgaggaggaagatggagagattcttgctggactaaaggcaataatttccccaaaaaacaaattaaaaacttttcccccaaatctctcaagctacaactcacagtatatatacatatgtacttttaatcaatgtccctagttttgattgaaatggcttcattttgcaggtagctctctccaacacagccatgatgggtggctctggaggcaaacaaacattgcgtatcttcccgaaggaagtatttcacagatggtttaccaggaggccaccttttcagctcgaatggaaaaaccgatgataatctggaaggcaggatagcattgcaatcaatggagtcagggagatatgagtctgattccattcaactttaaattccataagagcaaaaatggaatattttcttaacccactcctatatcttcagtgccctaacagtgcttgatgcatggaaggcactaaataactattcgtgggaagaataaacaagtggatggatctctaaaaactgtgtgactccaaataagttacttaattttattctctccaagtttgattttactcatctctaaataatcctcacctttcaggcttagtgaaaatggtaaaagagatgatgtatgtaagaaggcattgaatatccactcaataaaccactgttattgtggtaatgtggtctcatagaccatcaaggcatcgttgtctgcatgaaaaacaggtacatcactttatcccctggaaagatctgtacaaatgccttgatgtcctctgataattttcagaataacgattaggttcacgatggaagcaaattattgctgtttgttcatggcattcggtgcgtgtcaaatctccatgtgattctggtcagcagcccttctagacatgaaactttctcatagactggtagtggtaacacatattggtacagtctttctggaaaataacatgactgcgcatttgaagagccttaaaatgatttaaacactttggccttgtgattctccttctgggaatagttgtaaagaaagaactacaggtgtagtcacagacatatgcactagaatattaattacatcattattcttgtgtagtctccaaatgctataatccctttaatatccaacaatatggtaaatacaatggatacattactatgcagccattaaaaagcgtgagatcgaaaatgttcaggatattttgtaaagttaaaaaataagatgcaatgctctattcttgtattattccaattttatttgcacggtatattaatatatgcttagatgaatgacctaagcagtcttacagtagtaaaattatgatttttatttactataatttttttctatagacaacatattttcacagaataatcatttgttaataatcagacaaaacgtctttggaaaatataatatagaaaccataagggcttgtagaaggttatagtaacttctcaaagtaaaaaggtgagtgaggctttcttcactttcctgaaagcagggaatgctactgcttcttggatccttcttagagtgaagaaaacctgataagcgaattcctacttagatgttcaggccttgctggacgtggtcaacagaaaatatcatcctttgaaaatgactccaagggaaatgaaaagaacttacactgttaaatgttttgatgatggtcatggtaaagttttggtgggagaactacttcagagcacagacatttggagtatatttcaaataagcctctgagacaggcactgctaaacgttcaccaaatctgtgttctagccttcctcctgggcacacgagacttctcttgttgtttggggtagacatattaagtgatttataggcaacaaaatgagagtggaaatagtgggtaccacttcaagacctgttccataaacacctcccatgcacactcctcaatcatccttttctcctctggatgagataatcacagagacctcagaagccacatgaagacagccaaggtttcattagcctctgtccatcaatgactctgagaagaaccatcaactgatttgtacacccacccaaatctgttggatgagcaaattccttttaatttgttatatatttgggggcctctttattacagcagcaagagttaacctgactaatacagtcaccttgtttatagtctacgcttagctgttcacacgagctcgtcagattcattctcaatagagaggtggttataccattgttgtgcaagaaccagtccacaaaagatgtgaggaaaagatagagaagaggccattgtaccattttgtcaatcagtagaatcctatacaacttgactaatttttttcaccttaaggtagtaaaatgcgttggtttcccatgcgaatgtttagaataaataaaaaaatcactgctgtctggattgatagttttatcatctttgacatttgacatttgtctttgacattttttaatctttttcttctatttgtatgtaggcctcgtgagggaaagacttgtttattgcttgtttattttttgacttgtttattgctcctgccccagttcctagaaaaattcctagagtaataaccatgcaagatgtattggttgaagatgtaaattaatgtaatgaatgtgaaatggataaagacaaattcacctggtgagacttaccaccctaaaacttgagcaggagctttcagctagcagagaaaggatttcatctgacatagacatgtaattaaacataaaacaaatacacatgagacagtcgatttctatgttctatttcaccttaggagatatatctatcatacacatctagataccaaaggcagatgacaagtttgctgcacacagatgtcccttcacgtcttatcttcatcccttgctggcatcattttaactccaaggcaagtttccagctctgaccttgcacaaattcaccccctgatggcagcgagccatgtagttgttctcttcttaccatcccaagcagatggctcagagttaaatagccaataaatcacaatttccatgcaagaaagggcccaactacaaagtgtttgtttgttcttaaaattggttctgttgctgccaaataatagtcatttagctaaaactttggagtaattagctatatatgtgtcatcttttgttcttctttggaattgtatatatgtcatttgtttgtatattagtcaggattctccagagaaacagaatcaatacacagaaagagatttactttaagtatttagcttatggtattgtagaggcttagtcagtccaaaatctaatagtggaggcagacaggatggagactcaggaagaagttgcagttcaagaccaaaggcagtctgctgcagaaccaggaagagccgatgttggagatcatgcccaaagaccatgctggagaattccgttttcctcagggaaggtcatcgttttgttctactcaagtcttcaactgattagattaggcccacccacattatggagggcaatctgctttactcaaagtccactgatttaaatgtaaatctcatccaaaaacaacctcacagaaatacccagaataatatttaaccaaacacttgggcatcatgggtcagacaagttgacgtataaaattaaccatcacagtttgctttctcttttttttttggctcatttgtttttgtttgtcttttctttgttctaatccttttagatccttgggatcattatttccacagaccttacctgatccaaaaccttgtgatgacgtggaaagttccaagcccatatgccagctctcccactggccagctgggtaacaggtcactttaccgcagaacctccagttctgcttcagtgaacagagatacctaagtcgtaggttcattataacaatcaaatgggagaaacatacattgacaagctctgtaaactcaacatcatattgaaactattaatttcaattttgtttatgtatcagaggtcctacctttcaaatcaacaatgagaaaatagaaaattccttatgtgaagcacattacagttgtgagtaactggctcatcagaataaagaaagatcaaattaataaatcaaatttttgagtggacaatgattttaagggttaaaagaagctttacagaccacaacagatgattgttgaagatcccaggaatagtgtcaactttaaaatacacagagtattcatgtctaaagtcagggaagttagcatacccctgattctccctccgtgaattctgggcgtgtgccaggtggtgcggggctgctgtgacaaccggagcaaggagctcaggtgagacgggactgttgatgagaagctactcaaaaggactggacagagcttattactttcccaccctcgatgtccaattaacataccacatgtgatcggatgtcggattgttacgtgattgtcagcctccactgctccaggagtctctacacctcagattcctgaccagactgtgcttgtaactccaaagcgcggacgaagtttctccctcacctcagtcgaaggtcgatttgcttagtcctcatctttggcaccgaggcagacttctcctcacatgttagatttcagttccttttacagaaaatacccaatccactctcagcagggtagccttgccctctagtctgccaggtcagtagcccaacattagtggagttcccaaggcagtatccatccgccttaaataacttcacccataggacaaaggtgggaattcgttacattcaggcctgtttcttttcacaccctcctcttcagaaattcaaagaatcgtggggtcctgtctcattcaaggtctcttgttacaaaccatgttattgtggactactgaacaacctgttaacagaaattaagaactagtcctgcttgaaatttcttagaccaccttagacccaaatggagcacaccattttcttactgaactaaagattatgtgcttccagcaaatctccagagaacaaagccccaagatccagcaaaccatatcgtcagcatcttggaacgtccttgctgtatgaaaaacaacgtaatttcttcttaccttgttgataataaatatgtgttcttgaaagtggcggtgtgtttttgaatgtgccagaccaactttgatacttatactatgcaaagatttttatatctgcaattttttcttcattcagtgagaactggaacaaagagaagcttatagtgtgcttttattctctttgtaatagtggatgggtggttaacttctttggtgcagctttgcaaaatagtttgtttcaaaatgagaaaaaaatcaactgtatgaacactttgcttatattgcttttctaccactttctctaggaatgccccagtggtgttgttaatgaagaaaccttcaaagagatttactcgcagttctttccacagggaggtaagtacaaatgtggacttgttaacatactctcagagttagaattatgcttgcaatcttgagtttggtttaatctttcacgacgtgactctacattttttaatctttgtgtaaaagaattaatacacagcatgcaagcgcacatgattttcagtacatcataaaagtgagctacttacaaactatcaaacatccaatagttcactcttcagtttaatacaacaggtaatattactgtgtgtcttgtactatagttctcggatgcacaatgccttctgacttagttctggatatgccacaaagttctttcacataccttagaggtctcatttgactctcctaactctcaaaattaggacaaatgtaattatcttcaattttcttatgtgaaatctggggcttggagaagttaaatggtttactctgggtcacacatccactaagcggcagatctgggttagaacctagatttttctggaacctcacctagtgttctttctgctgtttctctctctttcattaactctttactatcacccttctccccacatccaagaaaattaatacccttctagatattattttaattggaaagaaaacaaggagagcataatgataatacatacatgttagagatgagtgaagagagatatttgccactggaccttacagtccctctttcaaccacccgataggatgctcacgtcagacttgtcatacagcctacgggatgcccagctatgtagtaggtgctgataacattagagaaataagatgtgatacccgcccaaaagaatgttgtagtatggtgtagcaaaaggacaatgtcaacatcaagtgtaagtgtgaagatagaggttaaaaaaatagtattatgagagcacaatgttattgcaattagactagcaaaggacagggggggaaaaaaaaggaggtgatccggataaattgaacccgagctgatgtagcattcatgaggcgcctgatatgtgcttggccctggcatgcattacccctcaccttccaacaaccccagctatgactctccctttttaataagtggggaaactaaggtgcagagaagtccgtccatttccttgccatcatcttttttactgctttctgcttaaaggagctgccatcatctcacgccaaaataaagacaatagtctctgacctagtctctctgatcctgatcctcttccttgctctcccaccatagtctatcctcaacgggagccagagtaatcctgttaaaatgtaagccagacaatgtcactgctctgctcaaaaccttccattctatcagagcataagccacaacctatatagtggctgatgagttgtggtcgctagtctccagttccctttctgactcatcctttaccattctccccttcgactccctacattccagccaccctggcttccttgccattcctccaatacaccagtgatgttgctgcttcagggcctttgaatttgctcttcccttttgctggaattctcttctcctaaatatccatctgcatatctcatcacctctgcctttattccaatgccaccttctcagtgaggctttccctggcctccctatcttaaagcacaacccgttaaacattcctcatgacccttctctgctttttccttctcttgagcacttaagagcacctaatcatatatattttacctctttttgttgttgttcattgtctctttcctcactagaatgtcatctccaagggaacagaggtctttgtctgtttcgttcactgctgtatccacaggtcttgaaatagtgacgacaaatagtcacactcgataaatacttactgcataaatgcatgagtacatgaatgggtgaacatcatccacctcataacggtggctataccagtacgatggaataatatttctaaaagggattctgaatgtatacaacacttaaatgtcagttgtttcacataaaaattagattctcttttgactttcaatccatttggttttagatatttcagtggattgaagacaattttgtgcatggattatcaaaatagaaatttttctttaaaatagccttttaaaagaattaaattagaattctgagaaaacacagggtgacgtattattacacgaacttgaatatgttgttggtgatcacaccctctctaccccatctcatcactaacagcccacagacaggcattggtcatagggcctaatgccaggattgtaatggactcattctctgcatcaataaagaatttggaataccacttgattaacttatatatttctaaattattaagaatcatggaatttttaaataaaagtcatgtttactatatatctaagtgtctgccaacatagtgatagctattaatatcaaagcatctggccaagcagaaatctttatttttttttattgcaaatgaaagttactagatgctacaaattggatacagctccacattaaaattttatctttatttgaaaaataacatttcagcattaaagaacatctagttaagcacaatgctttgcaaaggatccttgttacaagatctaaagggatttgaggaaaaatcactcttgcactcaaaagttctttgattattcatgttaattgaatgcataaatctaaaagtaccaggcattactgaaggaaatgaaatattttaaagaatgatgacttacaatttaaaacattaatatggtgcatgcaaattatatcttgcagtgctgctagaaatgggaaaatgtcccaaggaagaatgtaatctctgatgacaggcaaattcatgttatggccatcctcacacttctctggcgtcatttatttacgttggtggtctgaaagcaacaggtttctctcattatgagcagtaataatgatggatccataaatcacaacatcccaccatttcttccaggaaaatgctttgtcttttctacagaatctcctgcaatttgtatcgtgtcagactcttagttttctctaccgcttagcaagatggtttaccaagcacaacttgtttggtgttctatatgtcagcacaactggactaaacagaagcttcttgtttgtaggggatcaagtatgccctctataaaacaagctgaaaggaaatggctggtaggcgctgttacctgtatcttgcagcaatagtttttcaactccacaaacagtggaagctttagtgtggaagctgttagctcacaaagcattttaaaagctcatgaaaattgcagttttctgggctactcctggtcatgttggaattttgcacttactttttgactacaccaagcacctgataaacagctattgaaagaatgtacgaatgaactccagtcagaagactctaagtcattaaacatttatcgagcagctgctgagtgcaaggcgcttagacggcttctatggacataaagttttttttttttactttaaaataactccacccactgaatatccttcttgtcctatggcaatagttttaagaattttcagggtgatttgtggaggacttattgaacagaaaccactattcaagtatctaagcctgccatactatagtaacagtaccatgaattgtatattcaaatgcattcaactaattccatcccttgtgcttaaattcaggcaagactaggtatttaaggtgggaagaaagaaatcaaccagactgatttcaatccacagacctggcacatgataatcaagtgcatttgttcaaatactctgaaatgtacatgtatcgatagcttttttcagtcaagggtttagttggtatcatcattgtggtctggaaataattgggttaacaatgttggactaagctgagagtcctgggtttgtgcatggactctgccaccatcaaggtatgtgactcaaatggtttatttctcttggcctcaggtttttcctctgcaaaatgtggaacagcattttcataacacttataaaatgtggcatgaaggaattcccagtcttcttcctattctaagatcctttattttcaagagttgctgttggaatgtcttgatttcattacagactctaccattaactaggtgaccttgctaagtcactaaaagtacctacacctgtcttccatctttgttaaacattgataaacagttgacatccaagatctcttctgtcctaagactcaatacattttgtcccccaactgtaaaactttaacatttaattttaaacttcacaagtgaaataataagaaactgaggcaatcttggcatatcaaattcagtaactatttttgttatgtatgagcaaatttagtcaaagaagaccatcatgtcttgtgggaagaagagagacaatggctatcttttgagccccaaactgtactgaattctagaatccagcatacaagttattcatccttttaacaaatatttattttgttaaacaaatgttattttgttgaaaagaaaacagccagatgaaagcagaccataaaagcttctgtgggcagtttcccttttcttcatgcacccacctctgtgcccagccagacacttccagtgccttagctccttcctctcacttgaggctagtagcatcactcctctcctttaaaaactttcagtctccaaatgtctgccagaagaaatccaaactctatcagaaacctcaatgccttttacgacacaattctgctagtctttattgagcatgaagttgcatcatattagaactccagtctcttagacacaaaatagggatttcacaaaaaataggaacatttttgggtgaaaatgtattacatctgtaaaaaagttgatcacgtttctataaggcacttgaaataagagtggattatctatgaaagaataataataatagctattgttttattgaacattaatatgtgcctaggactgatccaagcactttgcatatggcatcttatttaatcttttcatgatggttccatgaagtacatactggttattgttatcattttgtagatgaggaaactgagttacagagcggttaagcaactttccccagatcgtgcagttaatatttggtagagctgagattcaaattctggcagtccgactcccctatgctatggacaaccattctctgcacagtatgtctaggctggaaaactggcttaacatccaggagaattgccaaggtacatttagaggcacaagaagtcctctgtaccacataagttcaagccttgagagtgtatgtcccatgtgtcaagttttaaagctagagcaaccccctttgagaagaatggtaattattgtatgctcatgttatcttgttttttaaatttaaaagaattgccaacatggtctgttctgcttgctaaggtaaaaacatttaccctgattgtattaatagggtagcaagagacctgcttaatgaaggtgtttataaaatatgcaaactctcttatttttctcccctgaaaataagtttaacctaccacctgtcaactcacatctccatagggcaataaatagttcaagaaagtctgtttgaaagtactgttgagagcaaaataactttataaataaaaatagacttccaattctttatgagggaacttcccaacaatcacactaagttgattacaattaaacccctggtcccatatttcaaaaagatatcttcctacaatccatcaatgctagacagacatccactccagatataattgtttgacatattatttatacccaattgtggtgcctgtttaattcgtcaaaaacagtattaataatttacatatttaaaaacaagaggtttctcatatcatatttaaaggtaaaaggtgaaagaaaatgcaccatcattttgagaaactgaggatacggtctaccttgtgaaatatctggtcttctatagagtttaccactggggtgaagcatgcaggaaaaacaatctataagtaggccatggtcacttgagagctgggagaaaagttgtttgacctctgacctcctttatttggggaagacgtttctatattcctgctactatgacttagtttcttgacagccttaaaaagcaattcataaagtaaaaggagaaaagaagttttgttaaatcccaataaaaataaaggttaaaagttattaaatagaaatatatgagattttaaacaaaagacaaaaggttagagccaataagctgaaaggttgcaaattttttaatataaaaaaaggttaagataaaaggctaaaacccatgagatgaaacatttaaaataatcaagtaaatttgatcaagggtcaagcacagaagcacttaaaaatgaaaaccgtgcactaagaaaagaaaacaatgagaaaaaatgtatatttttcagaggaaaagacaaagctcagagattaaggcgacaaaggagaaatagcagaagaggaaggaaggaaaaaattagaggaaaaatcctacaagcagcaaactacgaggcagtggtggatttcagtgttattaggcggcctcatgagcgttggggacaaagcgccatctaaaacaacctacagtcacccaaagcctcaaatcccaccccagacctcagcagagcaggagctccctgctgcatgtaactgggaacctttaggaccacacaatccccttccaacatgccacagaaacttcccaagtcaccactgttcccaattcatcaggcaactttcctgctgtggcggctagcctggtctttcagtgagaaagacttgagttgtgtcccattctactccttattaactgtgtgactttgggtaagtttctcagcctctctgagtcccactatccttatctgagttgtaaaaatgacaaatgaactaacaataacaacactaacaatagcaattgatctctgtctcattattattattttcattattttacttctagagatggtccctgtcaagcaccaagctgtttccagatgcatctcacttaatcctcacacccatttatggtatcattagtcgtcccagtgtcaataacatcacccaagtctcctatgttcagaatatttccagccagaaacttacagaatatctatcatcaatggcctctatgtaggtagctcactcctctgaatctcaaattacaaacctctactgagagcaggtgacagctgggaagaaagcacaagttcaaggagatagagcaaacctcctgaatgaagggaggcctgggcgtgctgcacaagtcttatgtaggatatggaaacactgacttaatgatatttccttttcacatttcagactctacaacatacgcacattttctgttcaacgcgtttgatacagaccacaatggagctgtgagctttgaggtaagtcctagacttgctttaacatgatttgacttcagacccactgaaagggatttagtctttttagtgggaaaatttgagtttggtagtttggtaatttttgtttttttgctttttgagccctttattctcctttttcctattattacggtaagaacactcaacatgagatctacccacttaccaaacttttgaatgtataatgcactattattgactgtggatacgatgttgtacagcagctctctagagcttatccatcctgcttaactgaaactcaatgccgattgattagtagctcctcactccccctcccccagaccctggcaccaccattctactcactgattctctgaatttgactattttaggtatttcatttaagtggaatcatacagtatttgtctttctatgatggcttatttcacttagcataatgtcctcaggttcctccatgttgtcacacactgtagagtttccttttgttctaaagatcagtagtactcacttgtatgtatacaccacatttctttatccagtcctccttccatgaacatttaggttgtttccacatctcggcgattgtgaatagagctgcaacacaggagtgctattatctctttgagatcttgatttcaattcttttggataaacatccagaagtaggattgctggatcttctggtagttctatttttaattttttgaagaagcgcgatactattttccatggtgactgtgccattttgcattcccgccaacagtgtgcaagtgttccaatttctctataccctcatcagcacttgttatctttcatttatttttgataacagacatcctgataggtgtgaggtgatctcttattgtacttttgatttgcatttccctgatgattagtgacattgagcatttttttaatacctgttagccatttgtatatcttctttggagaaaagtctgttcaagtcctcagcccattttttaactaggttattagttattttttactactgagttgcaggagtttcttatgtatttggaaattaaccccatattggatatatggtttccaaacattttctccctttccactggttaccttttcactctgttgatagttgcatttgctgcacagacactttttggtttgatgtaatctcacttgtttatttatttattttttttattgtctgtactattggtgccatatccacgaaatcattcccaagaccgacatcatgaagcttttcctctacgtttacttctaggaattttatggtttcagatcttccatttaagtctttaatccattttgcattgataactgtgtatagtgtaaggtacggatccagttttatcctttttcatgtggatatccagtttttctaacactgtttgttggagagactatcctttccccattgtgtgttcttggcagccttgtcaaagatcagctgaccgtatattcatagatatatttctgagttccttattatgttccattcgtctgtatgtctatctttatactgttttgattactatgcctttgtaatatgttttgaaatcaggaagtgtgatacctccagctttattcttttttctcaggattgatttggatatttgtgatcttttgtggttccacatgaattgtagaattgtttttcctatttctgtgaaaaatgccgttgggattttgatagggattgcattgagtctaaggatagctttgggtagtatggacgttttagtcgtattaagccttgcagtctatgaactttctatttgtttgtgtcacctttaatttcttttatcagtgctttgtagtttttggtatacaagtctctcacctccttagttaagtttattcctaagtattttattgtattgtttttggtgctactgtagataggattattttcctaatttccttttcagatagttcattgttgatatatagaaactcaactgatttttgtatgttgattttgtatcttacaactttactgaatttgtttatttgtttctagcagtttttcaatggaatctttaggattttctatgtatatataagatcacgccatttgatttctttttcttgcctaatttctctggctaagacttccagtactatgttgaactgaagtggcaaaagtgggcatccttgtattcttcctgttttagagggaaagctttcagtttttcaccattgagcctgatgttagctgtgggcttttcatatatggcctttattgtgtggaggtactttccttctattcttagtttgtcgatagtttttaatgatgaaagcatgttgaactttgtcaattgctttttctacatcttttgagatgatcatgtgatttttatcctttatcctgttaatgtggtggatcatgttaattgattttcatatgttgaatcatctttgcattccagggataaatcccacttggtcatgcatgtgatccttttaatacgctgttggttgttgctagtattttatcgaggatttttgtgtctatatttatcaggaatattggccagtaggtttttgttcttgtgatgcttctttctggctttgctaccagggtcatgctggcctcataaatgagtttggaagtagtccttcctcctcaattttttggaagagtttgaaaatgattggtgttagtcctttaaatgcttgtcagaattcaccagtgatgccatctggtccaggacttttctttggtggtaagttattgattactgattcaatctcctagttataaatttgttcagactttgtaattcttcacgattcagtctcggtaagttgtatgttcctaggaatttattcattttttttccaggctttccagtctgttggagtagaattgttcatagtagtcgcttataattctttttatttctgtgacgtcagttgtaatgtctcctctttcatttctaatttatttatttgaatcttctctctttttttcttagtctagctatggttttgtcaactttgtttatcttttcaaaaaacaaactctcggtttcattgattgtttctactgtttttctgttctccatttcatttatttttactctaatctttgttatttccttctttctgctaattttgagcttagtttattcgttttctacctccttgagatgtaagggtatgttgtttatttgagatatttcttcctttttaatgtaggtgtttatcactataaacttctctcttagttctgcttgatagtttttgagagggggaaaaagcccaagaacactttctttccctcattgttttgtcaagaagccactcttctctttcaaaagaagtgcaattgcaacacacatttagttttctttctagtactttatatctgttcgcacaggaaaagcacatttctctaactgcagcaccacaatcccagaaaggaaataattcagccaacatttactgacatctgctgtgggccacgctgtggttggccttggaaatacaaagctgttacagtcagagccctgctctcaaagagtcagtaagtggaggaaaaagaaagaaattaattacaacaaaatgctgtattcacaagcctgacagttttacaaggaaatctctcttcaaattatgtactttgagtgatttgtacagaaaacatgcaattttgttcatgaaatactaaatataagcatctttaaattaaatatgtcctggatgttcacatagctaaatatatataatgtcttattatatatatttatatatttattttatatatttgtatgtatactgtatattattatatattaaaaagtattattttatatttattatatatgttttattaattttatatatatatatttagctatgtgactatccaggacatatttcatcctactgattcttatatatagcatttcaggaacaaaattccatgatatatatattatatatatagtaatgtcatttatatggtgcagagcatgacatagatagtaatatatttaaatctaaatgttgggaaaataaaacaaacattaattctgatcagctatgaagactgttgccttttatttttgttaggaaaactatgggtaaaatgcataatgtctatttttgttaagcaaactacattctaaatggttttccttggtctctagggaatagaattattccttattttactttgtaattaattctggtttctctgttcaatatacgtgcaatattgtgatttttaataagaaatatatatttggtcttggtctccagtttcagggagagttcctaaaacacttggttgtaagcgatgagagggatagaggcatcatttgttgtgttaaggaggtgacttttggactccccctaaggatggggactggttgccaggagaattttagaggattggaacgttcagtcctacccctgacctctgggaaagggagaggggctggaggtcgaatcagtcgccagtgaccaatgatttagtcgatcatgcctaggtaatgaagcctccataaaaacccaaaaggacagagttcggagagcttctgggttggtgaacacatggagatttggggagagtggggtgctgggagagggcatggaagttctataccctttccccataccttgccctatgcatcccttccatttggctgttcctgggttatatttttttataataaaccagtaatctagtaagtaaagtgtttctctgagttctgtgagctgctctagcaaagtaatcgaacccaagaggggtttgttgaaacctccaatctgtagcccttcggtcagaagcacaggtgacaacctggacttgcctttggtgtctgaagtaggggcaagcgcaatgttgtaggactgagcccttaacccgtgggacctgactccatctcctggtggatagtgtcagaattgaattaaattgtaggacacccagctagtgtcagagattgcttggtgctgtggggaaatccctcccatacatgggaattgggttaagaatcgttaatatgtgtaatggaaacaagtttatttgaggtgtatgctttttggaagtaggggcgggtgcatcttacacatgaggagaaatttcagtgagtgccatgacaaaggaaaactgaagatggaataggaccaacaaggaaagattccggtagggctatatcagggaagcctgcctgtggattctataaactaggtctgaaggacaagcaggaactggtcaagggaataagggctcggaatgggaagcagtggggagtgaggcagagcagagtaacttgggcatgggaatgaagagcatgcatttgtaaatcacccagaagttcctatacaaaaagggagagccttcagagaaggctggggaaggaggcagaggccagtgtgacaagtgtgaggccctatgctgaggaggctggactgccttgcaggcggtgcggtgaggagtccttgggggattttcagcagggaagttaaggtaccagggcgatgttcctagaaacgagaagtgcgagtagcccctcttcattccaggagtccagacaggagctgatgaaagcctgcgctgcagctgaggcattgaacgttagaaggaggaaaggacttcaagagatattaaaactaaattggcagaattatatttcaacaaaccttgtcatgtttaggagggggaaagttcatttatgcatgaccagctacctggaagcaagggcttcgtggagtcaggatgaaaaaataaaggtgtagccttctaagctgtcattcagtcacagacccagtgacccccccctcacacacgaggtccccatgcagacggagtgctgttgaaatgaagatctgggccaggaaccttagcaggtcgtctcacagaacttagccaagagctatcactgagcagacaagagtagaagcctgcggtggctgagtagaaggtatggactgagaagcctgcaggggtcaaggccagggcagtagagtataacccggaatcccgatgtggccgcagcagttagtgagggaacggggcacgtgtgacagggtcaaagtaccagacccccataaggtttcttctgctgatagcagcttatgctcgccccctgataatatcatgctagtgtttactgcgctttaccaacaagaggaattccagcacagccctagtttagctataatatgggagtaaaggttccacttcacctagtaaaaacttttacaactgttttgcagacaatgagtaatgcaaaaactgctagtgatttcattacttgaaattacctatgtagcagaaatgtaccatcagttacctataacacatggtatctaatttcacatgtaaatttagtccagtgttaatgacaggggtcatgcataacgttattataatatttatgtaaaattctggtcattgtgatgaatggtgattataatttgggaaattagttgtaatggctatatattataagcattttggtaaagtgggtttcctttaaaggcaaactaacggttaaattaataaatgttaaatcaaaataaaattgaaacctaagctattgcagttattttctaaactgattagctacttcgaaaatctctagaaaacagaagcgattaggcagtgagcatattctgagtagcagtagcatcctgggaggcacagcggagactattctgattttacaataaagggaaatggaagttccgctaaatttgcttaaactggaaggacagagtgaataacacaggaggggccctggatcgagatatgactggatcccatttccactttgtcatccagtggctgtgggaccctgggctgggtagttaaatcctctgggccttagtgttcatgtctgtaaaacatcagcaagcaaagctacctcacagggtcatgaaagagtggaaaagtaataatggcggtacagggcttggctggtaccaacatgctcgatatttacaagatgtcacccacagcagttacaatgtgggagatgtttctaacaaagccaattaatcatgatcttggtcatattattaaacagtgatctcatgtcattgaacatattcaagcaaaggctgaatgactgctctgtccatgatgctatgaaagatagttctgtgtctaattatataataagcacttattacatgtcagtcactatactgtttaaaaataatattatcaattagtaatagctacacaaaataatgctaactgacccttgtttagcactcattatgagtcagacgctgtgctgagtgaattacgtatactaatttatttaatcttcttgggtactgctattatctcctttttagtaaatgagaaaagggcatccctgagaagttaagcaactgcccaagttcacacagctagaaagcaggagagccaggattcaaactcaggcaatgtggccctagaatgcctctctcagcagctgtgctatcctgcccgtgaggtgtacatagatcccagtccctcatctgaaatcctctgagccagttgagttttgtcgttgagagtcttgcagatttcagaaaagtaatgctgtgcacatgctctatatttaatgtctccagcggggtctgcagcatgctaaaattaaatgtgtaatatttgtgcagcaaaaatacgataaatgacaacggtggcagagctgctactgatcaccaatgtccctgtgctccaccttgtgagcacgtgactagccatattcccagcctctcccgcagttaagtggagacatgactgaggttttatcaatggcgtgtgggatgaggtgaccatggctcctgcctctctcttcccatctgcggagactgtgagctcacatacttcggttggccttgcaacgaagtggaaggagcctggatctctgaatgactgcatggagcagagccccctcccaatgtgtttcattgtatttgagtgacaaataggcttaaattgtgctaagccactaagacttggaagtagtgatatagctgttataatgtcctcttattaatgtgatagataagataaatgatagataatacatagatggtagatcagatagatatagagatggatgatagattgatagatattagaaatagtttcatgtcagttcacttcaggttttgccacaaatgagttttggcaccaaaatttacctcctctctctgtcttcacaataaagatttttttgctttttagtttaccagaaatattttggaaggaggtgatgagctgcagataaaaagtaaaggacttggggaccctgctggtggcacagctgttaagttcactccttccgctttggtggcccagagtttgctggttcggatcccgggtgcaaacgtatgcaccacttatcaagccatgctggggcaggcatccccagcatgatggaagcagaggaagatggttacgaatgttagctcggggccagtcttcctcagcgaaaagaggaggattggcacagatgttaactcatggctaatcgttccccacaaaaaataaataaatgaaaataagggacttgtattactattcacttgttagagatgaggaaaccaaaagttagagattaagtgacttgtccagagtcattcaataaatggaaggaccaggattgaactctagctctacccaagtctcttaaccctatggttttaaccagtgctcaaaaaacttttctgtaaagggcccaattataaatattttctattttgcaggccatacagtctctgttgtacttactcagttctgctgttttagcacaaaagcgactgtaagcaaattctaaataaatgagtatagctgtgttccaataaaacttcatttagaaaaatagatagtggctcatgttagacctctgagccataattgtccccccgccccatggagggggaggctgagccacgatgttcgctagatgatgtctcagatgacattctatgatttgattaccaagaatcaacatcaacttttacaactgccactcaggaatccatcccattcacaaaaatcactgattattgacacaattcttggctgtactatcaaccctgaacctttgccaccatttcaagttatcttctctccgacattaccaccatcaggcgatgcatgcctctgagcatgccccgaatggtcagtttacttgaattattgaggctgacctgccatgtgtttttcgtctggaatagctatacttgcttacctcaggtaatggatgacgacatcagggctagcacaattcagggcttcaagaaaactccattcactgacaatccaattcatacagaataaatgtgagcggcatcccctggagacatgacaaacctataaagtaatctctttgtcattctcactgatgaaataaaatgtttttctccccaaatatgagttatgattatgggaaaaactcctttctaggatgagtcattttgtcaaattaaatagctcttttcttttaagatgtcagccatcagggggaattatttaggcaatgttaccaataggtataaaattccattttatcagggttattaatcattaagttttatccttcttgtatccctcagcacacacatgcacgcgcacgtgcgctcacacacacacacacacacccccccctatacatcctgtacacataattctgttcttcctgtctagtgatcattctagggagcttcgctctattgaagtaaagtaaaaggtagcttagacatcttttcatttcattcatttatttaacaagtatttattgaagactactacatgccacacattcttcaaagtactagggatacaacagtgaacaaaagatacgtttttatcctcatggagcttatgttttctcattttcatgactaatttctgcagaatccagctgttctcaccaagagggttctttaatctgagccccatccatacatttctattgattcccaaggaatgtggccatgctgcatgtgtccaagattttgcttgtcaccctgtcattctggcctgctccttctctgtaatcttgccatggagtatccagctccttctgccacttcctgtggtccccagggcatgtcctttgaataccccatagtgcgtgctgcaatgtttaatgaaacttgaagaagattattacaagatagacaagagaaaagcacacaataaagatctctatctgctcctacagtctgaaggtcatgtccttcttttgttaaattctttcttttttctttttctttttgctgagggagattcaccctgagctaacatccactgccaatcttcctctctttttccttttcatgtgagccatcaccacagcatggccactaacagatgaatggtgtaggtgtatgcccaggatctgaacctgggctaccaaagtggagtgcaccgaacttaaccaacaggccactggcgttagccctttaattcgttttttacataaactttttattttagacgagttttatgttttcagaaaaattgcaaaggtagtacaagagtccccacacaattcacacccagttttctctattattatcattgtgtattaatatgataaacttgttataattgatgaactaatatcgatacactatttaacataagtccatgcttttttcagatttctttagtttttacctaatgtctgggatttttctttcttacataatttctgttccaagatcctatataggatactatattgtatttattcatcatgtccttttaggctcctcttagttgtgacagtttttcaaactttccttatttcgatggccttgacagttttgaggagtactggtcaggtgttttgtagcatgtccctctgttgggatttgtctgaagttttttcttatgattagactgtggatatgtgttttggaggaagaccacagaaggtgccattttttatcacataacattagtggaacataccatcaacatgatttatggcttgacattgacctcagtcacctggttgaagtagtgttagccatttctccactgtaaagttactcttctttccctctttccaaactgtaccctgtggaaggaagttatgcacagaccacacttaaggattgagaatcattctccactgttttgagggtggagtagctacataatttatttggaattcttctgcatgggagatttgtctcctcctctccatttatgaatttcttcaatcagttctttatgtcagtatggactaatggatatttattttatacttcgagttataatccaatatgaccttatttattttgttgttccagttgctccagcttggccactgggagctctcggttggctcctgtgtcccttcagcatatccccaatatcgtggttgtttttttcttttttcttttgttttgtttgtttctttgatcactttcttacttcctgacgctacaagatgctcctggctcagcctgtatctttcctgccccagtcctagaatcagtcactccaacatccatggaagctctagaaatctcttctcatctaaaagggctcagacacagggttcagatccagactgtaccacttctagctctgattctggggcaaggtcctccatctcccgtgctcaaatttcctcaatttaaagtggaaataataatggtagatacctcacaaggctgttgtaagattaaatgatggatctaaagagtttagaaaactgcctggcacatagaaaatgctcagttaacgttaatgatccgggttaacacctggtcagcctctgcaaattgatctttctctctctctcagtccgtttcagtgttcctgggcgtgtaactgttgctattcttctttagctgatcttatcttgtcatagcattcagtcacacatatattcacagattcgttcagtttctctttttagaacttaaggccattttctaattaatttatgcagtaattttatggcaagaattatgaatttctggtactttcaaatgtcctacaaaagttattcgtaagtaattgaattgcgatcactatgagccactgttccatatcatcccacaattatgtcacctgctaccaaaaaaagggatgtggcatacgtctgtatatactgttctgtataaccacagctcatcgcttaagttcttagtcagactcagagcctgggcttcgagtcagagccctgggttcaatttccagctccactgctcactggctgtctgccttaactcagtcacatattttctctgagccgccgtctgtagtacaaagacaacaatcctattccctatggttgcatgaggctgacatgaaataatgcatggaaattgcctaacacagagccccacacacttatcaataaactgcagccattattactattaaatttctgtgctcccagcgccctttaacccaggaattccacttctttcctaaggaaataagtcaaaatgacaggaaatacagagaaatgtttaccataacatcttttataataaagaaaaatttaaattaattcacatatccaacaataggaaataatggttaataaattataatatatccatatgcaaagcagtatttcgaattccaggttgcagacattagtaggtagtaaaattaatttagagattaatgaccagaatattaaaaaaattagtggaagaaaaacggaaaggaaatatcagagtaagaactttggtttctgtgtataattgtgtgtgagtatgtgtgtactaggtttccatttaaaatggaattcttattgtggttttgggtccaaaatgctcaaaagccactatgatagtattgttaggtttaaccatatgaaattactattcttggcaaatatgataaaaaatattggcaatttcataaggttcaacttaatatgtagttagttaaatgataccaatgtgaattttcagtgatgcataaaaagcttatcattttcagtgaaatattcagatttttatatatatcatatgacttttactataaatatatgctcaagtatgcataaaaaagatagactggaaatgtccaatgtgaataggtaacagaattacgtgtgattgcagtttttttacataagtcaagcattatatttatgtatacattatatatttatgtatgaattatgtttaaaaaatcattaatttttaatggcctccagcgagatcaaaccaaagaacgttcctctaacttagtttaatgtggttgtaatcaccttttaagacactaaattacctaaatagacagttttgtctatcaaccaaagtaagtatattacatcttctaagtggtaaaattagactacaagtctttcttgggaaataaacttcttgttattttttagacacgttgataccttttacaagctccaaacaaatgcaaactttaggtagtacctgaaattgtatctttcaaataatttaaatagtagctcaaccactgtagaagtttaaccccagtcaaggaggtcataccagaaacaataaacaaccttaaaagattttatgaaactctgtaagcaagtataaaataagaaatatactaaacatatgtgtgactttccttatcaaacctgtcactgcctagctagttaacatctttaacctttggcgagtcacttaatgttttccaacctgtgaacaggactgtttgttgcaaatactcacaaatgcgtgattctacgccatgctgctctttgagtggcaggtggggaagcaggaagattaatgttcctggcatagcaaccagtagtaaggcagtaagtaaaggtttggtagataaacaaagctcactactgaacaagactgggtcattataaagtcaaatctttatgcctttttccttgatcacaagagaatggaaaccagagttcagtgccgatcccccttatcatttttatacattaaggaaccgatgcaaccttctttgacagataaaagtatggtgattgtgcaaagtacttctgatatttttttttttttaaggcttgcaacttcctgcttgacagatttcaattaccattcagaaaagcatggagtaaaaactgtataagccacattgagtttctcatttttcttttgcgcaaaataaggaatcattcttgttttgaaataactgtttattgatatcatcctgcaagatggtatattagaagaaagaggggtgctcaagctccatagctatctttgaatgtaagtggtttcaggatagatggtatttaggaggaagatgtgaattaggtgtcagcttgtgaatcaggatatcttgcttcacaaacaatacaaaaatcatacactaacaaaatacggtgctgactttattcgttcacaggagcaacaagtccagatgtaggggtagctacaacttaagggtgggctcccttgtgctcgcaagaagatgcgtcagctccaggtctccaggcttgaccgatcatgtcaagcagggaggggagagcatctctgttgtagcaatcctagcaggagtgctaagaatcactcatagatgtggcaggggttcagtcacatgtcaactacagatccaattgtcttgactaaaaggataaaatgtgcttcctgactttccccggtcatggcaccatcactagagccagagatggaaggtgcttccccagaactagatgaagcaccaaatggaaattaggggcctacaagggaggtaaacaaagtccacaagtgactttgaactgctgtctttaaatctttcattcttcctcttgtctatttggctttggggccagtaacagtgatgattcttgtatgctaatggttctcaaagtgtcatccttggaccagcagtatcagcatctccttggagtttgttagaaatgtaagttcttgggccctaccccagacctaatgaatcagaaactctgggagtgggtcaagcaatctgtgttttagcaagccctccaggtgattctgcggcaagttaaattttgagaaccaatgctccaagcatgtctacaaagactttgtatgcagcctcccttttcaactaagggcatataactattactagtgatttgaagcaacagataaggtttatattaacctcatctggccttacacaattgtccagcaatctttctcagatgagcttaccttcccaggctgtgccgtgactattttataccttcttaaaaagccaaagcttatagtttgcaagttgcatactgcacaactccaaagggtgtccttacctcttaattatagtagattatatagtacaggtttatacatatattacaacaatttttcagaagatgcctggaaaatatttcgagggaggtccaccttcctataatttgcacaagtgaacttattgtacagcggtaaggctgcctccttcagtctcctcaaaccattgattctcacccttttgccacgtccttcacttctcaagcagacaccgttaaagctatcagatggggactcactcatcttcccacctcttaccagctattggtgtctgcaccacatctccctctttcttctgtatcagatgaggaaatgtacctcctcccttcacagctcggatcacctacctgcatttggatccctcccaccttctcagtctatttcttatcctccctctttctcacatgcacatctttagtattttcctctttttaggttctacctttcagtattcaaagtgctcatcttcaaaatctctcctgcagttccatattcctcttcagctgtggtctcttcctctgtcttcatttacagacaagatgggtgggttttctgtgtagtttcctcagtccctggtgacctccatgttgctgatccagtgagcagttttcagtcctcagcaccatcttgtatcaagatgaacaatcccttcctagtgaaatgctctcttctcctgacttctcttagctctttagccacttattttcaagatcctttgccagcttctcttcttctctctgccgacgatacactggaattctttgtgggcttcttttgagtcctctttttctctcactctaaattttaccctgaataaagatgggaagaaaagtagatatggttatccagctgtcacagcaccatttgttgaagagactattctttccctattgtatggtcttggtacctttgttgaaaatcagtggccataggtatttgagtttatttctgggttctcaattttattgcttttgtctgtatgtctatcttgatgccagtgacacactgttctctagctttatagtgagttttgaaatcgtgaagtgtgagtccttcaactttgtttttccttttgagtattgttttggctatttgggccctcttgcaattccatatgaatttgaagatcagcttttccaaaggtcaatggtcattcttgataaatttttaataaaatgtaaattgtataattctttagaaatttaactagacatagtctcattaaattcagtaacaaaatgaggatgtctattgtcattgtcattatgtagtattgttctggagatattattcaatacagttagaaaaaataaagtaattaacaatataaaaattagaaagaataggaaaaattaactccatttgcagctaatatgattgcatacatgaaaaacccaggagaatcaattgaaaaaatatcatatacagtaggaatactctgttggcagcatacgaaattattatatggaaaacaatagctttaaaatatataagcaagactaatttagaatatgtaatagaagaaaaaccttcatttatagaagcaacaaaaggattaaaatacctagaaataaatacaactaagaaatgtgaaagaacaatttggaaaaaacagaaaggcctaaaatataccagagtttggtataatgaataatgtctcgccaaaaatgtctacatgctaattcctggaaattgtgaatatgctgaaaggagctttgcagatgtgactaaggatcttgagatgaggagatcatcccagattatctggatgggcccaatataatcctacaggaccttgtaagagggaggcaggaagatcacggtaagaaagaggagacatgacaagaggagcagaggttagagtgatgtgctttgaagattgaggaaagggctgcaagccaagtaatgtaggcggcctctagaagctggaaaaagcaagggaacagattctccctctagatcccttgaggggaatgcagctctgcctccatcttgattccagcccagtgaaacccactgcagacttctgactccagaactgtaagataataaacatgtattattttaatccactgagtttgtggtaatttgttatactcagtgacaaaaatgactaggacaagggaaaggtatcctatagtcttgaataggaagactcatcaacgtgctgttgtcagttctgccaaagatgatctgttgatttacctcgaaccctaaaaataccccacacgtttatatgtatacacacacacacacacacacacacacacaagattcttcaaaaggtcatatggaatattaaaacaaggaaaaataaaaagaaaatagctgaaaaggaagaatgattaggaggaaatagccctaatatctattaaaattactaaaatgttttaataattgaaacaatgtagtagtacataaacagatatattaatgaaataaaatagaaattccagaaatataaacaagtacatagaggaattgaggatatgataaatcttacatctcaaatcagtggaaaataaataatattgtgaaaaaccagataactatctaaaaacattggataaattccaaattgaataaagatttaaatataaaaaaataagccttaaaagttctagaaaacaaacttggtagtatctttctatggcttcagaatggggaagcccttttcagtatgacataaaccaaaagacataaattaaaagatggacaagttctagaatataaaaataaaaagatgcctactttacaaaaatcaacatagaaaaatcaaaagaaatgacaaactgggaaacaatacttgaagacatatcccagacaaggactaattttactaatatgtgaagaatttctataaaccaagacttttgaaaaaattgttcaaatttattcataagagaataaatgcaaatgtaagtaatttgagaaagaaatagttatctataaaattggaaaaggtaaaagtttgataccatataatattgacaagttacaatattcttatatatagattttgggaggggacaatttggaaataacttgtaaaatttacaaatgttcaaatcctttgacccagcaattccactcctaagcacttatcctacagatatacttgttcaaacataaattatgtatatatgaggtcactctttgtttttaataagattggaaatctttattcatcgatgggagattggttagataaactatggtacattcatacagactatgcaacagtgaaaaagattggaattatttccaagatttattgctaagtggaaaaagaaaaaagtacagactatcatttgtgtaaagggaggaggaatatgtagaaataaatatgccttgtacatgtatatgcacagaaattctttggaagtaaatacaagctactaatgtcagctgtctacagggaaagaaatagggtggttgaggtccaaaaatgagaggaagagtttttcaccaaatatcttacatatttttaaattttgaactacatgaaagatacctatctaaaaaagtttaaatttttgttttgttttgtttttagaaattcagacaagaaaatagctttataaaatgatggaatgtagaaatgtagagagagaatgcaaattcacgcagaaggccacttctggattttccttctgctctttcattcctatctaaccatgaattgtcgactctgtgtgagctcaaaattcaccacgttgtaatgttaactctgctgtacagaacaacaaatatatatgaatttgatcaagttaatctggtttgtctgcaatgtaatcaaaccagcctaatcatggtattggctgagggctccatttacttgacaaacacttacatagccagtgcccttgccagacactaaaataagcagcttaactcttttaattgtcataaaaactttaagaagtagatactataatctccattttacagatttgaaaattgaggcaaaaggatgttgtctgatgacacaaggctatcaagtgacgtaactagaatttgaattcagcagtctggcttccagctgcatgctccgaacccctgcccgcatgcacattataacttgatggctaaataaaggttaaaattggcccatatcttatggacagcccacgtttcttgttagcagatcttttgcatgagaaatgtgttatgtgcttgtattttaaaagataatattagattctttttagtaaaagaactgtgtgcacttgtggaaagacaattactacttatagcatgcatcttgctgtttggggtctgttctgaaacaattgccagttccacagttgatataagtcacagtttccaattagaagatgcgaatggtaaaacactatggggggggcggggcttatgcccacccatgactctgagaaacagatgaccaagaacacattgatcatcttcatgaatacatgcctcaaaatcagagggttgcaacccttgcttccctttttttgagaaagaaattttgtcagagtttattgttttagaaatttcacatcaaattgtatttttatttcctttcaggatttcatcaaaggtctttccattttgcttcgggggacagtacaagaaaaactcaactgggcatttaatttgtatgacataaataaagatggctacatcactaaagaagtaagaaacgcctcaccaacacagctctcctttgagcctttttcattttttaacttcaaaatgttgaacagttgccattattaattagaaaatcactttttcaggatgtctaaaatattttttgtggtggtggagaatacaacacaaaatttataatggataggaatagtttatggtgaatctgcaaagtgaatataaaatgcataaggattaaacccttgtttcctaatgtcattttaataaataccgtaaatggaataaagaccgtggttggaactagataggaagaaaatgtatccaaaccatgttagactatttggcatgtaacgttttttccccaccgtgtaacgtggtctttatggaaacagatgcaatgttaaaatcatatggatcatgcaatgacctgtattgtgtgggaaatgacctgatgcaatagtgaggcccccaaatagacttctaggaagacaggctcacagaccaaattaagatgctcatatcaaccggtttattaaatcaatttaaaacatagtgagaagcaagggaaaatggatggagcaatttagtcaatttaggatatggtgcaagtggggttgaaggaccgtattacctgaatcctgggtgtgcctcaatgtctagatgtcctgtctttctctctgcctcacttgctttcctcagagttgagtttagagcaagaggcccctcaaacaaaaggtaccttgggccaatgacgtgaacttgctctactgaggacacagggacaagcgcacctgaccacagttatagcatgacaattaacctgatgaatggccatgggtttcatttgtgtttcttgagcagaggacatagagccagaacgtttttcaccaataagtggctgaagtaagagctcatgaatgttaagtgttcacgtatattgagaatatcctggatagttagtgccttttgtatatttggtttacaatgaacgtttagtactcaggtgcctccagaatgttagatatctctgatttcttcagtccctttctatgtttaacacaaacatactattcttactatttatacctaacacatctcatgaagtctccctgtgtcgaacaaacttctagctacttatatatactcaaaacatgttaagaggtttcacctatgatttacaaactactttatcatttataacagaattgaatactctcaaaagtaaatgtctattacatcataatatcaacttaatccagatttttatgtgaaaacttcaatatgaacaaaacaaatgtaaacaataagtctgaatgtttaaataattagatattatttttactaagagtaaaaatggcaagtcaaaaaccagattttgttttaataaaaaaattaataaaatttcaaaatatttcccagggtcttaatatttatcgactaatctacatatgtgacttctttagttaaagccacagtaggaaaaatacaatgaaaattcctttttattctttttttaaagattgacacctgagctaacaactgtgggcaatcttttttttttttttctgctttttctccccaaatcccctgagtacatagttgtatattttagttgtgggtccttctagttgtggcacgtgggatgccgcctcaacacggcctaatgagcagtgccatgtccgcgcccaggatccgaaccaccgaaacactgggccactgaagtggagcatgtgaacttacccacttggccacagggtggtccctgaaaattgtaacaagctttgagacttatcagttagttttagtacaattctaatgatgtggagttaatttatttatttatttattttttttttttttggtggggaagtttggccctgaactaacatctgttgccaatcttcctcttttgcatttttttctccccaaagtccccaggacatggttgtacatcctagttgtaggtcattccagttcttctatgtgggatgccaccacagcatggcttgatgagcagtgcataggtccatgcccaggatccgaaccgctgaaccctgggcctctgaagcagagcatgcaaacttaaccacttagccatggggctggcccccatgtgaagttttagtctcaataaatagaagttgataatcaacatataacatacataacagctaaataaaacaaagatcatttatgtgaagtatatggaagtccaaacgttaaaccaggatatttctttgcagatcacattaggtatgtgggaaattgcttcattttgaaaccaagagcagaattgatacttacattctgattgtgttgcttttaaggcataaagctgttgccttttcctctgggacaacccgaggcatttaatgaatcaaagaaagatgaaaaatttgaaattgagtagggataatctgtcaaagcttctcagagttgtttcttcatacattgcatgcagcctcatgtgcgtgccttttacttttcaggaaatgcttgatataatgaaagcaatatacgatatgatgggtaaatgcacatatcctgttctcaaggaagatgctcccaggcaacatgtcgaaacatttttccaggtaggaatgccacagaagtcggagaaggagtgaaactaagagtaaatttcctgatgtttgcaaagcatcatgatgaatcaaaagaatgcaaagaaaaataatttttactaaaagggacaaaacaataggatatttaccatcacagtaatttagtaagtttgattttgaatttattataacactgataactatacttattgaacattcactatctcctagatagaatgctaagcaattgccatgtttcatgtgtgttttttgttttcattcaattctcaaaacaccctatgaggttaaaaattctcaccagccccatttaacagatgaaaaaccaaggctctgaaagtttcagccaattgcctgaactctgccatggctagggggcaagacttttagctggggcagagtgactctagatcttcaccattctgttgaaaagggaacagcctaatagcagtcggccatatgattcttaccactaagaaactaccagcttgtgctctgaagcatttcctctccataaaacaaatagcctcagctccttcggttcagggatcagggtatcaaggggtaagtctgaataaagttttttggttttttctttctgaacagaaaatggacaaaaataaagatggagtcgttaccatagatgaattcatcgaaagttgccaaaaagtaagtaatggtagtaaaggactgtccgttttgcttttttagcagctagactgaatattgagttagccaccatgaattgagcaaaacacagatcatatgcctaaggttaccacttttacacagccgagataagcccaccactgtgaaataaccaccaatttatacattcaattaatcaacacctatagagtgcccatcctgaggcaggctatgcaggaagccctggggatacaaaagttgcacacatactgagtctttgctcgctaaatcctttggagaatattcatcatggaggataaaacacatgagatttgaattgctcttttcccagaattagcgtataacatgtgtattgtctatcatatctccatagatttagaattccggtaccgcccagtatgcatcactggacaaatttatacagttgtgcaacattttagtcaacgacagaccgcatagatgatggtggtcacataagattagtgccaaatagcttaggagtgtagtaggctataccatctaggtttgtgtcagtacactctatgattttgcaaaattatgaaattgcttaacaacacatttctcagaacagtatccccgtcgttaagcgacacatgactgtatctgatttctaagagaaacatcgttttaacgtgtatagacaagaagtggctttttggctgaaccaataatgtttcagtctctggatttaactcctcaccttaaactgatgattttcctcacataactgacaaggaaatgacaatgatgatcttcagttacgaagaggagaaatctgggtggttctccatcttctgatgggagaccagtattagcctacctagaatgagctgacatgatgtgtgggtagaatcacaattaggaatttttcagatcattgtagagaccaggaagtttgctggtgctttagcatttctctttattttcaaattgatatactttccctttcctgatgcctgcttgtttcccaactcgtattttgatgtggtggtctttgagagcattaacttggtgacaccaacctgcttaatggtgatgttgttacttggcttctggcattgcagtcatcattagttcggctaccatttaccattactctcaacagctcactgagtgccattcacaaacaatctccaagtgcctcagtaatgcccaaagtctgtcctcttaagtttttaaggaacatgctgaactgaatacagctactgggcaatggtttctcccaaacaattctttctctggcattgagagaccactcattttgaaaggttcctaaaggccatacagatttagccctaacagacccagaaagagaggcgtaatcactgccaacttgtctcgcaggcccccacctccagtcctcatgaagctggctcttagctcacacaccaactctgtttgcttccacatgtctgagtctctgagatttggcttgtgatgacttggaatgagagaatttgcatttgctcactttgtcctgccctctgtagtttccattctggcattctgatttgagaaatatcctctgttaacactaagtaaaatttaaatgaggtgttttaagtctgttagagtcaacaaaccattaaatgggctctcccataggtatctatgtggaaaacagaatggtatttacatttgcaagcacttagtatttgagcttttggcacagacagttggtgacgggaggcagtacttaagggcaaaatagggtactgccccttgcaaatctgccgaatttaaccccactgtttctcccttacaggacgaaaacataatgcgctccatgcagctctttgaaaatgtgatttaacttgtggaatacgtcctcaatcaaacacatgtgaactattctaccacacttaaagttggagctaccacttttagcatagattgctcagctttacactgaggcatattatgcaaacgagctttgttttaatataaagcaatccccaaaagatttgagttttccagttataaatttgcatccttttcataatgccactgagttcatgggatgttctaaatcatttcataccctgtgaatattcaaaagtaatagaatctggcatatagttctattaattctttagccatggaattattgaggctttcacattatcagtgattttaaaatgccagtgtttttttgctactcatttgtatgtattcagccccaggattttaaatggttttctaaaatactggcatctgcatttaatttccagaaattaattttcatgtttgtatgctgtaattctatttgcatactttaagtaaacaaaacaagattactacaattaaaaaaaaaacgcatagccccagtttctatggatttgctgccttctgttaaagacattcatttatcaggcattttttataacatgaaacaaattaatttatcaccagatataagcatatgcctaataaagcttatttaataagcatttcttaatttttcataatacatatcacagtcaaggcctccatgatgtatataatttgggatttgttcaatcctacaggttgactgttttctattgtgtcgttaagtggaagcccaagacagtgggaaacaaagtgaggctgcttataggcatatgcaaagggtcaggctatctgccctccagtacatggtaatgctttataacaagtaattcttaacagcattaaaggccaattccatcccctttcctctgaccccctcaaggcacctttgtattacacaacattcagggacaaagaaaccttgactaccccaatgcctactggggacgaagagtaagcagaattcactttgaaagcaacagtgattccattatatcaagaactacaatactaaaattcagtagaaaatgaatataagtgctaagcaacttatctagattgcattatgacttagctcatcataaaactccaataattcagattctttttaatgatcttaagccaaaattctaaagttgttacaatattactaaagatacacacaccttccctgtgctgcagaaatatcacaaagaccaagaggctacagtaggaggaaatctgtaactgtctttgcaacaataaatcaggtatctattctggtgtagagataggatgttgaaagctgccctgctatcaccagtgtagaaattaagagtagtacaatacatgtacactgaaatatgccatcgcgtgtttgtgtaaactcaatgtgcacattttgtatttcaaaaaaaaaataaaagcaaataaaatgtttataactctactgtctatatcataggtctttattccaagaaattttgtaatttctagattaaaaatattgcatttttcttatggcactttatagattttagatatcttcgtcttttgagtggtgctaagtgcaatgaagaagagtaaagccagaccagtgggcaggcagatgttttagctaatatgatctgaggatgtgacacgatagagatctgaggaaagagcgtaccagacaggcgtacgaggacgaaaggacaaaagagctgagggaggacaagcatttctgcaattatgactcttcagaaattacttatattcttttaaattacagctgtgaggctgtgtctgaagtgagaattgcaaagaggtcactccaggtgacctgaggcatagagcagagaaggtgttttctctgacgcttctgagatatgatattgctgctcctgtataaaagagtgaccctcatttccctcccttcaaaagtcccagtctgctttggatttggtgtggctcctcaagtccctgtggactctcttcttgccttaagatggaaggtcttattcttgctttatttttcttcctctatccgtttctcttgtaaaatgatccagagtcagcttctactatgacaacactcagaactatgcctgtaaattatgttttaaaggctttttaaattgaattaattgttaaaacacaagcagcacaacaaaaccaccgaatacataagagttttaagattttaatttctgaatatcttcatgtaccaaatattttcaatattttcagattatgaaatacaaaaataacatttactttaatacaattaacacctaaagtttaggtagttttaatgagttgtaataaacaacatacttaaaagagaatttacacattaaaaaaaattcttaaactagaatactctggaaagaaattgtcccaagcattctatattataaaatacatatttacaaacaataattaatagtgaattcacaaatgtttgtccactaatttaaatttccatagccttgatgaataaaaaacccaagaaatggcaaaatatctcaaaataagtatagctataaactgattgcaaaagggatattataaataaaaggcactagaaaatacaaacacatctactataaacccaataatggttgttcacacaaagcacaaaaatatgaaaaataaacccaacaaaattgtactattgtagaactttttttaatagctttccatcattaaccattcttttttgttgaagaataacttttactatgatttagtggaattgtgtatacttatcttaaattagtaaataatgaatggtggctgtgatttacaaaagaataaactgaagtgaatctgaaaaggttccacaggtccccatggtcagcgtttaacatctgtcaccaggcagtaagaagatttttgctggcctctttttcaacagcatatggagcagtatgttggaattttagctttgatgatgataaggcttccctgtcaagagaaaaaaaattgagcctcattagtatcatgcagggttcccctcttaggtattacattcacagagaagagcctaaaaaagtgtccaaaactcaaaagaaacaaataaaatgggatgagagcagaacaatggaatgagaagtggaatttttttctgtgttaaataaaatataggttgtctcttattgtttttttaaaaaatttaactagagaagtagttaggaaccagactactggtatttgaacctagcttctgccagtgacttcactgtcaaatctggggcgaattacttctctgcaccccagttactagatctttaaagggagataacaacaaaatctacctctgaggactgcagtgaggattaaacgagtttaatgtctaaaagcactcatcagagtatctggcacgtaacaagttcccaagcgctcaacaaagatggggtgtgtggaagtatgtaccttcctaagacaaatgtgtgtatcacttagaaagaaaattaaatcaggctaagaatgaaccaacttcaatttaaggcagatagtaaccgatgagttacaagaaaatgacactgtgactgtctgtaactgttatttttgtttccccagaagttgagtcattccatcattgtgatatctgtaagtcctaagaaacgagaaaatgcaatattgagaagaatcttcttttaaagactcatttctaacatttaaagaaaaagaatgtttaaatttttagaagggacagaggaatattcattaatttcatgaaggattacaaaataccaaaagcaagcacagtaataattaaaccgagggaaagttgttgatatggaattgcaattttctattacaattacatcaattattattaaaatattatataatattagaaggagagaacaaaaaagagaaaaagtctgaaggaagaaacaatatgtaacaacccttataacttcgaaatcttattttattctgtattagcatgattcaaaactaatgagattgagtggcaataagaggaattcccttgctagccatctctgggaccttggagtggtcaacttcaccctccaaatcttcatctactatttctgaactttatttatgtgcaaactatcccctcccccacacatatccatgaaatctaacatgctcagcctcccctttctacttgccctcttcatcataccagcccacaggatgtgtgaaaaccacctggggagagcttcagattgaaaagctgtgcctccattatttagcgtctgtttacttgcatttcacaagggaggaaaaggcaaattcattttgcattccagttctcagaacagcaagtacatttccaagcaagaagaatcccgtttctgctgaggagggacactggattggctatggctaggggatggttttgtacatctcaacaggtgtctgaatgctaatctctgcctaggacacaacaaagaaatccattctataggagcctagggactgacttcctctcataaactttattctaggcatgcatcatagaaagaatataataaatttaaaaagtcattgaaattggtcaaattagctaatttaggcaaagtttaaactaaaatatctgccattttaaaactgtatgcaatcacacagattttctttataattaattgctttaggggccggcccagtggccgagtgtttaagttcacacactctacttcagtggcccagggtttcaccagttcggatcctaggcacagacatggcatcgctcgctcgtcaagccatgctgaggtggcgtcccacttgccacaactggaaggacccacaactaaaatatatacaactgtctactggggcgatttggggagaaaaaggaaaaataaaatctttaaaaaaaacacaaatattattattaattgctttagaaagcacctagaatgaaactaagttctgcaatgttcagataatcacatccaactctatcataaagatctgattcaatgtaatctccagacaagacaggatcaaaagaagatgggctctctgttttatggagctacttccaagactaaatcgtctcaacacttctttcaaatgatgaagattcagttaacctagttatttgacaccactgtaggagaggaagacattttctctacccgctctgggtccttctggccggacaacaaattaaattgacatgagagagaataacaggagaaaattaaacaaagctttataacatgtatacatgggagagacccaggaaaactgagcaactcaccaaaatggcaggagccctcaccttaaacaccatcctcagctaaagacaaaggaggatgttgggggtgggaagagtcagttatggaaggttagcagaaaagcacagtaaacaagagtaaggttattatgcagatttaaatccttgccttccgaattgataagagcttctagagataaggtcattttcccttcctcctggtacagagagggagacacctttacagatggagatttcctttacaaatgcaaatgtctcttaacaaagggtaacttctacttttcagggtttctctcatgtctacagtttttaacagtaaccagcccaaaataatcctcatgccaaagagacatatcttggggtggccaattccaatcccctacaccacacaggtagtaatgaaatcccccacattcttgcaccgttttggacattcttcttgcacatttttgcaagttagaataatcaactgaatcattcctctgtgtatgcatgagtgtgcatggttcagcacacatatgcttccagaaataatattgcagccatctggaaacttcacttcaatctttgactatgaacaaattataacttttttaggcacaaaagataagcaaataagagagaaaaaagtaccttttcttcaatgagctctctatgttaatcttttgttttcccaactttccatggtcaaagcaaaaacatcaaaaataaagaaaaaaacctgtaaagctgtcccacatggagtgccatacagtaagcacaatgaaagtgtgcaggcctgctatctacacaagctgaacctgaatcccagggcttaaaaattccacgatgtaggaaagacagaaactctgagctctaaaatgaaaataatagcatcagctccacatggttacctgtggctgaaatgagcttatatgttatacagtcaattctataatatgactaaacgtaggaaaaaatgacttaacgaataaggttctacttacacttccgccatgctgctctagcttctgtaaagcactggtgattggctctttgaatttcttgtcccttagtctcttggaaagcttttaaaataagattgggggaatgaaataatttggaaaagtaactatattcaccacaagcataagtaaaacttcagtaaaaaataggttaaatagaaatgatgccattcggtctttacggtatactacatccatgaacatgattaacttgttttagatttcaaggcttcttttaggaaatacctcattgaaatttatatataatagacaccactatatttatttaaaaaaatgaatttacgttatttcagataataccaattgtacaaaatctgctacagtatggcatccagaataagcttcctacgaaattgcatactttcccattttgcaatttgtaagagcacctggaggactatgacgggaatctaagcctctaaaacacatgtgtttcctatagtaaaaaaaagaagagacaacaaagaagagagcactgacatgaataattcagtaacagtgacaggcagaggaatcaaacgagaaagcacgtgaccacctgtccctaggaatgtcctaaatgggcctcagttgtgtaggtggaactctgactgaacagggagagagcacagagtgagtggaattgaatcaggggagccaggagggaaacaccacgtcatcgaggacaaactgtaaccagcgcccccaccaaatgtctgcattactcacccacagacctaacacttcagcctacagcaggactcgctcagggctctacttgctgcgaagataagtgaagcccaggcaagaattcagtcatggatcaaatgcttacaaggccctgtcctagagttggtttctggttcttcctcttctcagatatggagataacccaggagtactacacaccactgagcactgagcagcaggtcccttcagtctggtcatggaaagttagggaagatcagaagaggctcccagaaggataaaaatatgagaaaagcaactctaaagagggagcaggcagggcttatcaatgccctggggatggacaagaaaaagtgcttcttacagatcataggtttgctgtcttcagaccgtgttatcctggagcaggggtttacaggcagacccatgaagcaccaccttcagaatcacctgacatactcactgaaagagcacagattcttgggtcccagcgcatacttactcaggcagaatctcagggcaaaggcccgggctctgcatgtttagcaagattcccaggtatttctttcctctttagggtttgaggatcactgccctggggtcagcggatggtctcttagagctaaggctcagagaggatatgacttattttacaaatgaagaaaatgagctgtatacagtctcagtaactggttttgaaattcattttctagaagaggaactctttcttcaaataaacatctaatgaagaagtctatcaaacagatgaaaatggagcctttctggctcaagtaaggtaagtgaggtacgcagggagcactatggcacctcagtggatcctcaagggtgccttttgtctcaggatgtgtaactaacagaccaagacctaatccccagggggcctatttccaaggctctctcctctatggataccactgggatccgaaggccagtgcggtatctaggtcttcccaaacggttgacacccctggaaggagaaaggcctttcagtcagtcctgtcttaggaaaagcagagctctggggaagactgtgagcgagcaaagattaatgccactgacccagaaaggttaaaaaaaaaacgacgactcacatagtagtttagtcgttaatctgacttcccctctctgccatggtgggtgggactgggaggctgtttgggaagcaaaggttctggtccttgctcaacttcgagtttggggaaggatccagtgtgactccttttctctatatatcacttgcacttcacgtcatccgaactttctcagtggatgtctttgctacttgtttctcccaaaaacaaaaaccaatctccacaagggcagagggcatatgtgtttctgttcagcattatgttcccagtgcctcgcataacacctggcacaaaatgggttaacagatttatcttaaactgttgagtgtttgactgaagcaatcaatctaaaatgagtcattttatacattagtgcgaaattcctgtagtcagctacaacccactgacctgaagatcataagcaagtatctgccaggattctcttccttctgtcctaagacttcccacatgtcaaggtttgagagtctattctcactatgtcttctccccatcagacacctggggggaattcatcttccacgattcctaatctcagcacagcaatcgtaatagattcactatcacctctactttctattggcttagccaggtggttcctggggtttattagtttctctgcagagtaagaagttaaaaatacagttctaagatctcttaggtggataggtccaagagaaaacagtggaactctgatcaaaatacatgcttcagctctgaactacagaaggatgcatgcagagatatcccagctgtgggttatttccagccaggactttaatctttatattagtttccacaggaaaggattaacgttgcctaaagaaaggtctggccctcgcccctggctcctggatggaaacctttaagcccttggaatatcctgccagataagagtgactttgtttacctgggggccttgggccacagcagataatctatgttaacaatgcgatttatggtgggggccttgggccacagagtatccctggacttctagagaggctggagactaaggtcaaccacactggcaggcagatatgcctgagtgacaaactcccaataagtactccagacaccaaggcttgggtgagcttccctagttggcaatgctccatgcatgctgccacacatcatcgctggaaaaagcaagcactgcccccactactccactggaggaggacaagtggaagctccacatttggtttcttctggacccaatgctctatgcacctcttccttttgctgattttaatccgtatcctttcactgtaataacctgtaacagtgaataacagctctcctgagtcctgtgagtcctttcagcaaattagtaaacctaagggtggtcttgggcatctcctgaactgcatggtgtcccagtgtatatctgtgataagaattaaactacatatatcagaaaaaagtctcgtccttaaggctcttgatggactcactaaaaaacttacaaagaaaaagatgaaaaacatggctgtggcaatatacaattacacaagaggggtctaacttgtgcttataattcacagctaatcaacatgggcatgataccattatactgttcattaagttttgcccattcgacattcaacttttggttactttttattacaaccataaattctgctcaagtaggtgctttccattaaaaaaaatgaaagacaatactgtcccttagtaaaatattttatgaactactaggtctgatctctatattttttggttttggggatgatgatattttctttaaggttttaaatcattttaatgattaatttgaagccattaaatcatgaagagatacagatactacataacacatacaaacaatcacactctaatcttttcagtacttacacttgtgagcaggtgtttcagatggtcatttagagaaggaccaacaacaacacttaactgcaccagagcattcaatcctctttcaaacacttcatcatccgaatgggcctgtagggcgttggttggttaggggtataggggcagggaggggaagaggggaaaaaaccagaagaaggatgattaggagaaagggcaagcaagtgaagaaaaagtaggattgaacattcaaagttagaagaaaatcaaccaaatccagaatttaaaaaataacctttaatgcaggacatctagaagcaaaaagtaaatttccagtttcactaaaacattaactaaaatatatcacagcatgcagaaagactgatttgaggttcattactttctctaattacttaaaatgttcctttttacctttagtacatcctctaaagatgtcttcaagtaagtaatcatctggctctgactaacagtggcctaattctgcgctcacatcaaaatcacaggtaaaggactaatttgcatataatttggaggaaaagaaagacataaaacattctagatataccagagaaagtccaaaggaatacaggacataccagagctgcctttagcacaggaatcagtctaggaagcaaaggcacagctttgtcagcagcaccttggaccaaaagcaattctctaaaaccttcctttgacacgaaggtgtatggatgtttagtctctctcagaccctgccaaagaccaaaaaacacacgatttactacccatttagttatgctaagaacaaaaaaaggaatccttacaggcttagtgaaaatcgagttttgctattattgttttcctgtttatgaaatataatttcagtaattgcaatttcatttaaactgagaaattgtggaacaaaagatatatatgagagaggacggatgggaaaacaaaaagaaaaacagtaaagaactgaaggaaaggaaagataaaggatataaagaaaaaagaaaaggaaagaagaaagagagaaggaggagggaaggagggagagggaaggtaaatgaaaagaaagagagaaaaagaaaaactcactaggatgctaaacacaatttgtaaactcccaaacactgcctgaaagcataatgcactagtctaaaatgtatgtttatgaataaaaatcactttatgaatgcaaaattattggactccccccagctttatggtgattttacaacttgtttactgagtttctaaaatattatatttccttcacatttaaataataagatattcagaaaacaaatcttgcattctgttcaaaaagcattgtaagattttaaatatcatttctaacattggaatgtgaaataaaaatatgaaaaaaacctctgtagatgttttctcactatgcctttcaccctaaatgcattagaaacaattagatagtactcttgatttaattgatcactttgagtcagggcaaaacagtcacctttttcaaaaagataaaacaaattttaagaaagcaatagcaatattccctcagtaaaaccagctgcaaagtcatatctaaaaatattaattttaaaccaattcgtcctttagaccaaactatgtttccaaatagtgaccaaacacttcctctcctctatgcaatcatgcttttgaaaactatgctgccagcacctggcaccagtttggaacacgggttctatcgtcttaggagtacccctagtactcctagcctgttcatttcagagacgaggaagctcaggttaggaggtgacgtgcattgcaatagtggttgttctgtcgtacttcctcattattaaacaagtggagggaaggctaaagatctagccagtacagaaataaaagcattggtgcctggtaaacaggtacatgaaggactgactttatgtgatctacactaaactcagagcccctttggggactccccaaattatagcactccccctaccctgtgagcagctggactatgttctcaaagtatcaatagggtagttttgattcatctacaaaatggtatatttacctcagctaaagtaataagaagaggatcaaatggaagattttcaggaggacactcccactgtaacctgtgttttactgaaccatggaccaacctaaaatataaaagttagtgaatgtagctaggacaatgtaattatatactgaacagtgattgtctgacacatacatattctttctagaacataactatattagaattattttgtaacacgtaggaataccatgaatttaaaacatattacaaaggcaccttataaagcaatgtccataatctgcaaattcctactctttcagcaaaattgtttggtggcaaaactaaacaaccccacatttgttaaacctacacttctgcagctcaagcatgttgccatgtgtgagtcttaatgcaaatggttcacttgctatgtttcagtcataattataacaaaacgtaacgtacagaaaatgaaaaaggcaaacaaaatgtgataagtagaaataataatttcttttatatggaacattgcttttcagacatagatcatttaaccctaacactaacgatctgaaggcaagccaggtttgatcctgttaaagagaaggaggctgaggccgggaaggggcagtggcccatgcagagtaacacagaggcagtccttcgaactagagccactgctgctgctgccttttttttaaacagcctttattgaggcataagtgacatgcaataagctgtacatatttaaagtatgcaatgtgttaagtgctgatgcacgaaaatatccactgaaccatcacgacaatcacgacagtggacttatttatcatctccaaacctttcttcacaacccttttgtaatgttctctcaacttcttgactccttctccagtgttattttcataatagcaagaggcctgggtgacactatttctcacaattttagcaacaataaatttctcagagtggggaagggatgtaagagccttaaaatagtttcaattcagcatgtaagtatgaaacaataacaataaattgaagaatgattcttgagcttatttttcacttacagtccttcaaatccttctaatctgaaaataccactaaaatctacatttcttgaattttagaacaacaagaacaataaaaagaatgttgtgattatgctttacacgatgaaaatgaaatttctatcatctagagcaggctaagactggatatacttagaagaaatacatgtctcttcatagtaaaatcttaaaataataacactttcttcgtaacctatactatattctttaaaatagctatgatgtctgtccagaaagtttgtaagaattataccaaaggtgagaaaaaacagtcatatgtactcattaagaaatacagtataatttcaataaatataatttcaaaactaatgaaagaatttcattaaattgtcaactttcagtttataaacaaaataagattatttatttgcaacttgcccaagcttgtgaatgcttaaattgttttagaaactggttcattcagtttcttaagtcatttggtgatttaccgcagatctattgctaactctattttgaaattaaaaggattttcttcaataatgtcccaggatctataccaatccaagagccgaagtgtgaataagtcacctttatttcaacctccctagtaaataaaacttccaatacatttaaactgaatactgtattgattttactcaactattttgaataatacggtcagttataagttgtattgattttacctgcaaggaatacctcctttagagtaaatagctgcaaacgcggaaggagttcgtgactgttcaccaaactgaaataaaaaatgacaagaatacaataaatattactatcacctccacattgtgatagttaatgaattttgatctcgctgaggtcagaggcaaatgcacgccctgactttcaaaccaccatgttagtatcaagggcatcattctactcagcaacatgactgagaaaaaccatcaatcctgtcagtaccaaaagcacaactacatttgtgcatttccctttacctctaacttgtttcagaaggcttgaaggtagctgaaaccatacatacatataataaatataatttaataaatattgttaaacataaataaatataataaagataatacatcttgacacccccttccccattgtgaccattcaaggtgagggctaaatggaggcgaggtattaagtatagagaaagcatctttgttttcagcctcccagcacatttcctacttgttctcaagccaaatatggatgggctagatggtcagagaacctctaagttctccaaagtggctctatgcttctataaaaatcaaaggcttaggttgggcaagggtgatagagttgaaaatggagctaaactctcacaaacatatgcctggatgtgtctgcttcgataatataactttataagcttcagttttgctatacatcattatcttaagaatagataaattctgtatctactctcacagaggatttaagaggtaatcaataacaacagttcaacaatcacaatatacataattcaataaaactgaccataaacttaaagaggatttaggcataaaaagtaaatatttcacctcatggtactttgaaaatagccaaatgaaacagagttgtctaaatgacaaaatataaacttactaacctattttacagatataactagctaaaaaaatgtttttaattacatgcagtaatttaaaaatatacttaagagtgtaaatttagaattagtcctttttcctttggaaaaatacatatgttttgagtaaaaatacatagatgaaattcattaaaataaaagattcatttagaaagctcaatccacattctgcgtggtaattcacagtaataataatgttttattcatctagttataattcctgctaagaaaaagatgttcttaaagttgttttcaagtaataactgtatcagataaggaaattaattgaaaaaatgttgtttacattgggggaaaaaattaagacaaatcagggctacaaagactttttttagttctaccacttactaacaaatgatcttacttttggacctacaggccacataaataatctctaaattcccaaaaccaaaacaaaatttctgattgaaattctaagcaattcttttccttttctttctaattcattttaccgataaccatcgtttcatcttccaggtctcacagaatcaaaatttttttctacaaatagattcatttgataagtttttaccagaattccattagtgcgaacaaaactgctgttccttcaattttaaacaatattaccacagaccatatttcaactgtaaaacaatcattattaaatatacactaccacatggagttagcaattaaaaaactttttgattcaagtgaaatacttgaaatttatacatattaaagtgcatgaattggaagtgcacagttcactgaattctcaaaaattgaacacagctgtgtaacaactctccaacttaccttcttcccaaagctaaccactatcctgactttgttttggattggcagcttttacatattttagacacgatcttttctaatgtactctattttcaggccaaattattaaattattctccaaaaccttcctaaatttttaataatttacgactatggccactaaatattattacttttaaaagtttttctttaaagagaggaagagaattgaactgtcaccatcaaccccctcaactagaacaggaaaaggaagcagtggcaagaagacatcaaggcatcctcagggattccatttcctcgacactgcgtagattacagaaaaaaagcaaaggaatagagatattcaaactgtttttcatttttcttttataaagtcagacaatatccttctaccctcagtttattgtctccttgattaagtatctgtcacattttacctgccatcaaaatcagtgtctcagccactcttgtagtcccctttaaaggctgaaaccagtaccctctgagcccacacaaggctgcaccagacaccatgaggtgttgttgcaaaggtgtgttcacttttggataattcactgatctacatccttacaattatgcacctttacgagcataaatctcatgtttgttaaatctgattaaactgctgtgagaaggcaaaaggaggttactgctacagttaggatttctggtggagctcatttccagatcatcaagagacctttatgcaactgtggaagcatgtaattcatcctatggcaattgaatacaagtttattcattgacattaggaagtcaaataaccagagtaaataagaaataaagctgatatgcaatttattttatactctaccatattcacttgtttatgtgacaggatataccaaaactggttaatctctcctttacacattctcatttccacactcactctcacatgcacatcactatgtccattcttcatcatgattgcctatgcccttcatcgctagattaaaactaaccaacaaaagaaacttaggatagcacccaggatggttcaatagcgtactaaatgcatattactgtgaaaaatccactgagtcaggaatctcttttgtacccaccgggttaattgttttagggttaagtttatcactcggtcgaggatgttttcttgtagactctggtgaactggttgatgatgaagatttgcttcgttgaactgtagtcctattttttatttgtgtgcttgatgatatcctttgatcacagttacctgtaaaaaacagaacatcaacagagagataaaagccatacatctgtataacagaatgcatcattaacaaaattcaccttttcatttaaaaagcaatgtctgtacctgtcactctgtttctcaactgtacacctccatggcactctgatttctgcattgcttcccttttactcctgttgttaaaagaaacaatttcaaaattttgtgggcaggggattcattaacaacataaagaccaaaacagaataaatacagtaaaagacacataaataaggtagggtatggagcaaaatacctgaaagaccaacgagaaaatataaaattatcccaacttcaataatatcaataacagcaaattaaaaaccatccgttaggaaataagatgtataaaaataaacatttttcttccattcaaactgtcaaaatatacttttagaaactcaatttgcaatcctctggctatattcagcaaacatgaactagattcctgaaaggagtggttggcacatcccctatgatctccatctttcctgacctttatattttcaaagttccaaatgctaacggttgcatctcaagccctactttttcactgacaacaaactccccaactcaatggaccacaagctccttaaactgaatataaccgtaagtgaggttatcacaccgaagttatgaagcccttgttaattcaagatatcaccagttttctggtccttcaggctaaaaactttaggaccactgttgtctccttttccttcgcttcctacactcaatcctagagatgcgatcaatatggtgtgatgagggagacggagctgtgggctcacatctgggtctgtatctcatctctaccaaataccaggtttatgaatttaggcagataatttaatctccctaagccttgattccctgacctattaaaaggaggagataatacaagcctatcaaggctgttactgaggagtaaataagataataagttgctcacccagcaaatggcgcttcacttcttcctctcccacaattccctcttttctgctaatgccagggctctagttcacagctcatgatttcctgcctaatccaacaaatttctaaacttatatctctaccaaggaatcctccaccacacacacgcagactcacatacccagtgcctggtggtatgtctaggtctagctccactcctaagttccatgcagccttgcctgattgtctgtttctcaaaggtacacttccgcagcactctttttctgcactgcttccttcttcttatttctacttgattattccattcccctactcacatgacatccagttattcttccattagagcgtttcccactttcagactttaatcattatatatatcactacccctcaactacactgtacgatcttcccttaaggcaacacaggtgaagtcctcttcaacttccaaatgacagcttttcaagtatttgaggacactgactccacacgccttagtttcctcttcttcaggataaacactgatgctttcttaaatgattcctcacatgagatgattgtaacctacttggcaaattagaaatcatcacgaggacaagctccatgtaatagcattcagaccaaaaatatttcaatcatgatgtgaccagatcaaagtaccttgtaaagataaactaaatgtaaggttctttctgtacacagaataattttaaatttcaattttcttgatttaatacattgacttaattttctcatcttactaccagcagatgatttacttctcaatatcacacatcacattctaggctttttatagaaacatggtaattaatagcttattaaatttgtcagataatattctaaaataagttacggcaggctttaaatatgtcaacctaatattgctcttcagtgattattcaacaagtatttactagtgtacttggtctatattttaagaagttcctgatggggaacaatacaacctaagtttctgtttgaaaaagaaaatctctgtctcaatttcctcaactctatatttggggataattacagtaactactgtaaatgttgatgaagactaacaggttaatatacgtaaaacatttagaaaagtgcttggcacacagtatgtgctatatgaattttagctattaccattttctttataatggtacaaagtgttttttagtattagtatactaataatagtggggttaaggtaactaaatatatttccttctttttgaaaaatttggtttaacattttgggctacatcgatttgaagatccagttaagttcagttccttttgatcgcaaattataatcgctgtcatagctaaaagagttgcttcacaaagatgcctacccacaaacataaaaagagcatagttggccagatcaaatcatgatggacccttttcaacactactcaccaattctgcaaaagttttcatagtaataactaaatttctatcttccttgaggtcaaaaaagttgttcttgtaaggtactgcattatattttgaataagttcaaaaagccactgaaactcctcatttgaaaaacttttacacacgctagaaaattgagctaccaaagcttttaagtatacagggcaatttttaagtgtaatatacttatgtaattttcagcaacatcaacgcacacacacacatacaaacaatggtgcaaacatttctatgtccactttcaaaacaccctatatcaggagacttctctccaaaagaattccttttccacttattgctaaaagtatcaccctttaccttattacacattaagtgtgctcaatttttaaaaatagtatccccctgggggcataccactgacgacaaaactggaacatgagctgtttgtaaaagaaaatgcttaattcatcttatgctcatcttatgtttttgagtgctttttctttaaataacatgtgaagggtggcataaacaggtgatagtgggagaaaaaggtaagaactattttgtgtcataaatattatcaagttcaccccacattcttttacaaaataatacaaagattctaaatagacactagaatccataaatccacttacccaaacacctaaaatatgtcacaatatcagagagcaaacaaaccaagcaaggccccccactgtggaaccctcattttcccttaggtttgcttaggtcatctacaatgggctctaggcatccgtgtcaatgctaggaaaacatacttccctttcactgttttggacagctcacatatcctatttctttctctatatgtactttcttcccacactcagctttgagactactgcactaaaccgctcgctaaattctcaggggcagaggccgcgtctcttcctactctctaatccggtgtctgcaaactgcaaaagtgtaataggcaccctactaaagaaacagtgttctatctttaaagctccttcaaacaccaaaggacagcgacagaacctaatatccgcctatctcaattcctttttaccataaagtaaatctaaagggccaatattaagggttttaaaatctgctttccatttttcttacctctccccttcaaacaccacagatttccaaatacctaagaccagttcagggccagggtgttgtcaaagttagaaaatgaggagggcgtggaggaaaaaagtggagaaaaacagaggtttgttttttttttctttaaagggggttgtggtgggtgaggggaaaggcggccggtttcaattcaggccgtcgaaggctactcctagccaaagtcagaccccaggaaaggaacggcgcgtccttggtgctcagcatccccaggacccctagcaacggaatccggcggccttagcaacaggccagctaggaagccaacggtctgagagagtgcgggcggcaacgtggcatccccgcacccgcggcccacggctccgggcacccgttcctaccgcgcctctccctcgtcgagacctggacaccagccaacccgacgcctgctcacccaacagcgtccggtcccgccacgggccgccgaggctcgggtactaacgaggtttcgcgtggtgcccgaatctggcggcgccgtgcagtgacgtaaaacgatcactgcgtcctctaagccaatagcggggaggccgcagaagcgccgggcggaagagggtttccctggcaacgaggcgacgcgagttgaaagggccgctccggagctagaggcgcttcctggtgacgaagggacacttggtggagggtcttttcggaatgagaggtccgggagcagagaagagcacaggctcctagtttcctgcgccgcagcctctccccatcccgtgttcttaagtcttaacgcttcactcgcacgcttaaaatactcagtgttctccagctgtcttgccctagatcctctgagagctgaggaccatgaactcctgccccagggtcttcaggagagagaaccaaagccatccgcctgcctagctgtggaatttcacttcctgtcacattttactgactcacatgctattgcattcaactacataatgcattcacattttaataataaaaagcgtgtgcttttgtactccagattattttaataaaagtgatgctgcaggaaagtgcatgtcgccttgcaattccaccaaaagcaatttgagtcgtcaaagtaaaaagcccaagccgtttcagacctgtccactgcattcctttctaacctcctctcctctcgtcaacccataactttaactttttgcttaggtaatagcaaactgtacaattggcattttcagaacacgccaggcggtgtaatccgtgcctgcccttgtagctccattcttgacatttgaattgccaccccagaagcatcttccctaagctgtgttacttcaggacaaggactgtacctttttctttttgttgctccagcttccagcacaatgtagtggggactcaggaaacactctttaaagaaatgaacaaatgaattctacgtacatctaatttctctaatgttctgtgaaccttgcatacaagtcaaccttaatgtttaaaattcattataatgtatttacctatctttccctctagactgaaattgtctccatcgcttttctatccccatgatctagcacaatgcatgcttaagtcatgttttaacaaaaaaaagaagaaaagatcctatttcttagctactctcaccttataatctttatttttaagatttttcaagctttattatagctcctggcccccttacttacaactagcatctctattgcagacttagcaacacctagctgatggccttttagcccctctacctagagtgtaagagtaatttgtattcagtattgcagagcagtgaagtgcacgtggtatgaacttaagctatccaggttggaaacccagctccatcactaatcagctgtgagccttgtgcaattcctttaacccctctcagccttcatttcctaatcataatagtgttcttgtaagatttacacaagtgcacaagtaaagtttctaacagaaagaactcaataagcattagctagtacagttactgaggtgaaaacaagttaaagtttacatagaatatattgtaagttgcagaaatctcaagctatgtcttggtgttagtatgagaccatggataacgacatggatttttcagattttttaaaaataaccacaagtacctgtgtgagcctctcctaatcgtaatgaaatcaacctctcgtaaactttctgtctgcattttagaaaatacagaaacaggttcattgacattgtgccttgtctggattcatgcagtaaatggtggatagtttcttggccatactagtttgggaagcccgtgaagtatccaggtgaagaagacagttggatacgcccatctagagtggagggctgagatatgagtgagagctgtggagtttagaatcactggcatatagacagtaaccgaggccgtaggagtggttgaagtagtccagcgagagcgtgctgtgtgagaaacacggagcagatagtggacttctgacacctagtcctgctctggtttcaaggttgaattctctattgggagggagagagggaagagggaagcaaggttggcctatgtgtctagcaatgtagcaaatgactctgaaaagacaatgtacaatatatctcccctatgctcctacagttttaccctccatccctctccaccccactgtatactctggaaagctgatcagtatacaccagcatcaacaaggctcccatgccctctggattgcatttgggtttggctagtggggaactctaacaggaaattgaggaaaggagagaaaatgaaatcagagcattcattctccatcttccatccctaggaggtttcctgggactggctatattcctagatgaagggcacagttcctttctaaatggccaacttcagaactaaaggcataaaatctcaggtgctactagcccttgattaatactgtccctgtcattcccctacactttaataaatagtccctttgtaaataaaaccttgccaaatggtcctgtttttaatgtttcactacatattatataagattatgaatgagataataaatctaatcaaagttgaaaactcgtaatagtttttctcattgttttgattccttttcacttgtgaaagtgtcttaattatatttgtttatttaccaagcatttttaagaaaatagaagtattatgagcttgactttaattactttaaagaaaatctgtccctttgtgtacaaattacagactgactgatcggtcgcaattatcaggaagtgaaatgtaagatattttccatataatctccagtacatcctgtcaggaaatgttagatatcatcattgtataatcattgagtggccacaagaaaaaattaatttttaattttaatctttttccacaaggaaaaacttaagcagtgatggtggctgctcaggtgaaagtaatggagatcgacatgaatgagcatacaaaggacagcattgtccaacagaaatataatgtgacacatgaaattttaaatttcctagcaggcacatttttaaaaagtaaaaaaaaaaaaagggtgaaattaagtttaataatatagttttatttatataaaaatgtccaaatatgtccaaaataatatcagtgtgcaatgattataaaaatattagtgatattttccattcttgttatcatgctaagtcttcaaaagctggtacgcgttttacactacagcacatctcaattcagactagccacatttcaagtcctcagtagctgcatgtagctagttgcaaccacattgaagagtgtgaagagagagctgtggcctcagagagttgtccaaacatagaaccaagtaaattcatagagtgtatcaaagagttacagagtagatactgcatgtagaacataccattagatgttggaagatcatgcaaaacgtaaagggaaaacgaattaattgattaggaacccctgattgtagaatcagtgcgagtaacaacttcctttatgattcacagtggaatttcatttcctttacaaattccctttttgtctgtggaggaaacttaatctgcttccccggagaaattgttggggaaggagctgtgaaggttgaggggtgaggcatctggtcatctgttgtcatctgcctgtgctgccatctgctgagatgtttttgacttttctggatctcagtcacccatcctctatccatgtagattgctcatgcatatctgtcattccaagttctcattcttagctaattctactctcctcttaagtacccaggaaatattctattctttccatctgaagtgagagaaatccacccactagggtccacactgtggagatcagggaacctgtgagattgcctttgagtcctttgcctagacacactaggtggccatttcttctcatcctgcacccgactatgttcaggagcatctagacccttattagctctgggacatttccctggggataggagggaggctggggagggcagggcacactgtctctttgtactcagctctggaccttgactctgaatgatggcatagtcttccaactcttccaaataaagactcatccttgtacttggatttgaaaattcaaagccaagaatttgactctccttgttagtaccatttatgatgacaataagcataaagtactccagctgcagtctacatcgaggaggtgtcatggggtagcaagaaatattatttttacagaaacatttttattacattagtttgtaacttatttagaatgttttatagaattttttattattctgaggtatcagtaagaatgatataccatttaaggagtctttcattccacttagttcaactatagcctattaaattgaggtttagagatggataagaaagggatgggtttctcatatatttatcagaaagtagatcattaaccacaattaaatcagttcattaagtcctaggtaattaattctcattctgctgattgtgggttaatgagtcctctttcacaaagtcatttgcaacagggctgaaagaaatgcaaagccttgactttgtctctctgtacactctgacaggtgtccgtggtgatggtgtcagattgtaacggaaaacctgctcacacagattcattctgtataacacgaatagttaagagcacctggtgcagtcttttgctgagagaattatcttgtttatttgtctttgaaattttgttccagatgactcaatgtctgatccatggcttgagtcctcactactcattctatggttttcaggtcatcatcaccatcaggatcatcatcagcgagcttattagaaatacagaatctcaggccccagcccaggtctactgaatcagactctgtactttaccaagattccccagatgaggaaatgtgctttacagcttaagaagcacctgtttaggcatgtgtgagggtgaagcagaaactgcctcttactgataaagagtgttccctattaaattattagaaaaaccacaacatcagaatgaaggagaatatatttctccattgaggcataatgtaaaataattttacagggatttactcaaagattacactgagagtaagaacatattatgaatataaggcctgctgtgggttgaattttatcccccccaaagtcacgtgttgaagtcgtaattcccggtacctcagaatgtgaccatctttggaaataaggttgttgaagatgtaattagctataatgaggtcatactggagtagggtgggtccctggtctaatatgactgatgtccttataaaaagaaattttgggacacagacaggcacaaaaagagaacaccatgtgaagaggaagacagagactggggtgacgtgacagaagcccaggaacaccagagattgccggcaaaccaccagaagctgggggagaggcgtgggacagattctccctctcagccctcagaacaagctagctccgctaacatcttgatgtcagacgtctagcctccagaaccatgagacaatacattccgattgtttaagccacccagtttgtcatggcagccctaccaaaacaatgcgagagccttgagaaatcctcagggcccttcaattcatcccataatgtgtgttatgattgtcttctgttgaaaagttatgttaaacctagaaacataatatttcttttggaaaacagctcaatttgttgacaaggatgccagtctttgaacatatgaacttaagtaggctttcctgcaatctgagagtcacacaattgctggaacatatttctattgacaacattttggaatgacatgtgtataattaacccaggaggggctgagactctctttatttttgttaattcttctcgtactgtgggattcataaaaagaacagctctcgctgtagtattgagctaattaaaaatctgaagttgctaatttttctagtgttcttccttactaacatgagggagcaaatctttggtgtttcccagagctgtctagaaaaccctcaaaatagtttaagtacaaaagacatactaacagttttatgattctgaatttggggactgaatttggcaaaggaaatactaaaaagaactgtcaaaagtaacgagatgtcgggactcccagtggtgcaactgttaagttcacacattctcctcagtggcccggggtttgccggttcgaatcccaggtgcagacctatgtactgcttgtcaagccatgctgtggcaggcatcccacacaaaatagaggaagacgggcacagatggctcagggccagtcttccttagcaaaaagaggaggattggtggcagatgttagcccagggttaatcttcctcaaaaataaaaaaagaaaagaaaaagtaataagatgtgaacaaaatatatgaaaatgtaaatataagaaatgattgcaggcttggttcagatttcaatatttaaagtcagcaagtaacaaataataataattaagaactctaaacttttcaaaagtgagacttttgttgaaatagatatcagatcatgaaaaaaagcacaaaagataatggactcttgagtaagaatattatgtgatataaaaatcttattttccaggaaaaacacacagaaggcacagaataatttttgctgttccttcctaaaatcagactgtatgttcaaagtgcccatttaagtatctgataaatgatagttggattaattgtttcattgagaaagaaaataaatacattcctcacttaactgtagggtcatttcttgaatctggtcatagcttgagggtttagaaaggactctggttggttggttggttgaaacatagaccaaaaggtgccctatagtaaatgcagttgaaatgctagacctgccttgttatactgtcgaggaaagtatccaaaggtgtagggatattgaaattttagagtggctttatcgtataagatctgctcacccaccctagagggtggtagaagctattgagccaagtagaaagcacttttcacttcaactgggagaaacaaatttgtgagtggagccccagcatccttgaagagctctgtgtccaccttttgtaggtcagaagttacagtaaaactattgttaccaaaattggatccctaaatacaatggggatcccagagtggcaggggctatgtgaccatacttaatcaccaaagacaaggtgggtatagttaccataatagacagtggggtcaaagcaacctgactcacagagacttatggcattggctagttgatcatggtgtccctagcggagaaatagatgggcggtatactaaattcttacctgatctgtctaagcggaagagtttataggtcaagtaaacagaaaactaacctgaatcagcaatattggggagcaagaacccctcaatcaattcgcagacatgagacagtttacagacccagaatcccttgaatgaagggcagaatgagtcctcttcaggaaggacctgccacactccccaaaacctaaagtgttaatctttctccaagtcttcccctaaaagagacctatgtataaccttttaccagggtgactgtgcactgggggcaaagaaaaaatcatacttttcaaagactgctggacactggctctgattccgcattcctggagatgcgaatgtcgctatggttcaccagttagagcgggggttatggaggttagatgatcaatgggattttagcttggatctgtcccacagtgaccccagtgagtccccacacccatcagttatttctccagttatgaatgaataattagaataggtatgagcagtaactggcagaatccgcacactggttccctgacctgtggactgagggctcttatggtagaaaaggccaaatggaagccactagaacagcttttacctagaaaagcagcagaccaaaagcaataccacatgcttggaggaattcagagatcaacgccaccatcagggacgtaaattaggcaagggcgatgattcccagcacgtcctcattcagttcacctgtttggcctgtgcagaaaacagatggatctttaagaatgacagtggtttatcatatacttagctggatgatgactcatatccaaatgtggtctcattactcgaacaagtaaacatctctccttatacgcagctactgatcaggcaaatgtctttttctccatactggtccacaaaacccaccagaagtagtttgctttcagttggcaaggccagcaatgtaccatcactgtcctacatcaggggtgtgccaactgcccggccttatgtcataacttaatctgcaaggaccttgatcccctttcttttccacaagctatcacactggtctcttacattgatgatacagtatgctgactggacctaatgaacaaaaaagtagcaactcctctagacttattggtaagacatttgcttgttcagaatgagggaaatagatctaactaaaattcaggggcctccacctcagtgaaatgtctagggctccagtagtgtggggcacatcgagatattccttctaaggtgaaaggtaattgttgcatctgatccctcctacaaccaaaatagaggcacaatgcctagtgggcttctttggattttagaggcagcatttttcgtgtgagtgtgttgctcaatccatttactgagtgagttgaaaagttgctggctttgagtggggcccagcacaagaaaaggctctgcagcaagtccaggctgccctgcaagccatcctgccacttggccaatgtgactcagcatattcaagggtgcttgaagtgtcactggcaaacagagatgctgtttagaacctctgacataaaggattcattttattgaggtggatgataaacaggttttaaaacttctccaaattctcgcacagccttcattttgccctctgcacacttcgcttgatgtggtggttcattttatgtgtcaacttggctgggccacggtggctagatatgtggccaaacagtgttctggatgtttctgtaagggtatttttggatgagattaacatttaaatcagtagactttgagtaaagcagattgctgtactcaataatgtgggtgggccttatccaatcagttgaacgcccaagtagaataaaacaatgaccactcctgagcaggaggaaaaattctgcagcagacacctttcaaacttgaactgcaacattggctctctctggagtctccagcctgctgacccaccctgcagattttagacttgctataattgcatcagctaactccttaaaatagatatttctatatattaacacatcccattggttctgtttccctggaaagtgatacacttgatttctccatgctgtggagtaaattccaattgtccaacagagtagtcttgaaaagtagtttcaaagctctataaaaaggttaatctgtgatctctcaactccagaatctctaaaatacttgttctgtactgagaggcaccagctgagtttggtctctggcacccacattggttaaaagaaagagatcagtgctgggaataaattgagcaggtccaaagagcctggtgaaggtaagtgactaagctccatcagtggtgtctatatggcttctatttaaggtcaagtacagttaggatgaaacatccttgatgagctgtgttcactgggaagattaccagatagttgccagttcttgctttcactgcttcacataaataatcttacctattattgttgagatatgaatagtggagttaaaataaatttaaatttaatgtatttatgagatattaggatttatattcaaatttttaaaggaatcaaaataatttaaaatggatagagaaaataccacaagcatttatgtatttgtctagtatggaaaggaagatacacaaactccagtcaaattttaagttttagacactagatggcgctacataactatctcttttctgcttcacagccttcaactccagttgatgttttctattgtcagccagcaaattgaagagaggaaaaatataaaggctatttacacaccgtgttgaacaagatagaggttttattaatgatgagctgaacactcttgtaattcaattgctagcaaaattattttctttattgtcatatatttgtaccgttaaaaacaggaaataggatcagctttgaaacatgtccaaaaaatacagtcaggctaaatgcaatcagcattgatgggaatggttatcttgaccaaataataagtggggggaatgactgtaacataatgcatctgctgagctgctttgaaaaattatttttgaccacctgtaatagactatttgcattttcatgattcctgcacccaaggacactaggagggcttgaaaatgtcaagaaagattctttctgctggagacttttacctcaaaataaagaaaaaaggtccctggaagaaaatttgcctgggggatcaggatttagattttatcactgcttgtccgtttggattatatttaacactagacttgtccaatctgtataaaacattcagtgcggcccataacggtctttcagggatggcctgattgcaaggtagtgctgtggttaggaatcacatgagacatgaataatactatgctactatttctaaaaaactttcagaggcaaaattctgaatttaaaatgcgttaggatctttgaaaagtggagaagatcttgggaatatcaataacaaagcaatccaaagaacactgtaagcattcctctcaaaaacacagatgaagaaatattaaaaaccacaaatgttgagcaaggtattcatgggccttaaaaatgtggttaagcaacaggggaaaaagtattaaagttcaacagagtgcttctccaaagggaaggggcaagacatatggttaaatcggttaaagctgacagcaactgacatattaatcagtatttggggggacagactaaggaagatcacctttaacaaccagagttcgcataatagccccaagtcagggcagctccccacccctcagccttctctctgcatcctccatggtggaggcaataatcaggttattcaaggagccaaactttcagagtatgttgaggacaacaatgccccagcccacagcctcatccaattcttatttataaaataagaatctctgaggcttctttctcttcagagcgatgaactcacgcccttttctctttgggctaacaatgaaagaaataaatgtatacatattggatgctattctccagatgccgagtctctctccaggtagcaattaggaaggagttttacagaacatttagcaatggtgccctgggagtctgaaagagttaatgtccctctttagacaattactaccaaaaggttacttctgagagaaagtgtgttttatttagttcataaaagagatgaagctggagactgaagtgaggtgggggcagacccgcatagttcacatctttaaaaacagaaaagaataggattcaagagacctcaataaatcaaagaaaagaccttttaaaaatagtgatatgtgccagatggcacacatagaaatcaatattctgagtcctttagggatggggtttaattctttcaggtcccatgtagcatctgacacagagatttgcacttagtgggtgcctagttaatatttattcagtcagattgaatcgggcacaagtacacacacacacacacacacacacacacacacacacacgtgcacagggctgtaaccaggagaactgaaaaaatcattgatgcttcaatcttaccaggtatagacaaataatatttcagctgtagttgcttaatttccaggacatttgtgttcaattttaaacatagtttaaaactttgagtttgagattaaatgatgtaattcagaaaaataacaatagtcttatgttaaaggtgttatttcattcattcattcacttaataaacatttgtgatacaataagataggtaatctgctgcctctgccttgaaggagtttactgtacaacggatgattcttctgaagcacatctatgctcagagaaaaatgaccaagtcaccctctgacacagggtggggcagcctcccaggatgtcctatatacaataacagcctcttgggctggttatgaggctttgtctctcagcttcaaccctcccttccgtactctcctttgtgatgcttgggctgggtctatgcaacaccgcatttccctttgccagctggctcccaataaaactctgccaacagggggcgctagagggagtctggaagatagccaagatgaggaggcgacttgcctcttggctggctgtgcccgtcaagatcaggccagttcaggagctggtttcagtgaacagattcgttccaaactttcagagcagccttaacacatccatcagagatactatcctgagttggccagtcactcccagctgccccgaaacttaaccccacccccacaggcatcaacagcagctggcagggccacctccccagtggtccggatcccacctgcactggcttctcttctaagtttcgaggttctagtcgctccctcctgttcccttagttcccccagcccttggggtagcagccgcttcctgaagttataggtctgtgtgacctcagcatcttccagtgccgtgttaacccattccctgtgtgacactctcactgttaaaattgcagatgtgttttatgtgttcctaaccagaccctgactatatcctcctggatcattccatctctttttctcgcacttcttctcatcactgcatttgttaacacctgatatgttagctctgacttattcattgtcccctacgctccatttgaatagaagctctttcagagcagagaattggtgtttgcttccctactgaacccccagcccttggaacaattcctgctatctagcatgccctcaatacatgtttgttaaatgagcaaatgagtaaatgaagaacgatgaatgaatgaatgagggaagtagctatgactatcagcagtctacggctcttaccctcctcctctccgctaccgtatctcattctcactcctgtcactctagcaccttcctcaggttaaagtcaactttcactgccagctctcatgatctttggtacagggataaactatcaatattggatagtttagatcagtgattctcaaccatcctcccagggaacatttggcaatgtctggggaacattcttgttgtcatcactgagaggtgaacggccttctggcatttagtggtaagagaccaaggatgctgctaaacgtggaacaatgtgcaggaccgcctccccaaaacgaaaaattatttggtccaaaatgtcaccagtgctgctatttagaaaccctggtttaggcattaacctgtttagaagcaagggattgctcagataatattttcaggcaccttttggtcctgtgaatgtatttctttgtctatacaagcccaagtattctcaatgaaaaaagatataactcacttcatcatggccaaagacccagatgtattgtgttttttttaaaaaaaatgtgatacttggaatcctgtagacagaatatccagatgactggctaaatatttggctctttggctcactctttctagagttatcgagacagagtctatgattaaaagtatggtagtgatatgctagttggagggctgggggaagggcagcaggttgtttatgaaggtacataagaagtgtttaaaagaacagagtgtcttctttttatcaattcaaatcccataataataattataagagccagctggttttcccccaaatatccagagaatagccattaactggagatacagagtttaaaaatgacataaatcacttgggcatttgcattttgaaggtcattttggatgaagcaggtggcttcctcctggacgtcaattatcaaaatctattttcttaaaaaagaaattgacccacctgggtaattgctattctgatgaactccaaccctaagtttcttcctctactcccacacttccttgaacaagtccactctatcaacttagctaccaaaatatccaagaggtatatttttcttctcagtgtatggcagtaatcccatctaatatatcaagtggaatacaaagtactatgcgactgtcataaatttttccagcgcaattcccagagtcattacttagtgtcatcctctttccaaagcatacttactaactttttagtaaacacgtttgagccttcatccgtatttatcatcctttaaattatggctctactaatcagataattagagatggtcattaaaaggacatttagttgggttcacatccttgctgcaaaaattgctgttgttcaaaggcattaaagacagcatgttccagagagtacctgccaagtttgccagataaaatagagatggtcacttaaatttaaatatcaaataaacaacaaatttttttcaacataagtatatcccatgaatcatggaatgtgattgtactaaaaagttgtgtggttcatctgaaattcaagtttaactaggtgtcttctatttttatttgctaaatctggcaatcctggtgcctgtctgccaagggtctacctctttgtaaacttctgtaatagagaaattcattttaagtgataatagtaacaatactttctttttatgtgatttcctattttcatggactcttctctttagtgaagcattgctcataaaataattaaaatccataggaatctttacatccctgaaaatgcagtcatgagctctagtttcaaattatgaactcacagcatcctgaaaacaggctctgtgagatcaaccatttacaaagtgcatggttgctgtgtcttttatgctctaatgcgactaaaactcagtcccactctccctccttaatcacagttccatggggaaaacccaatgattccccttttggttgatgatcagtgaacatggcatgtgaataaaataactccttagccgtgtcacatatggtcatcgaaccagattcgagctcagctgatctgattacctgacttttcccctgattaattctgagtgacacagagaaatcaatcatgaggacagccaaaataatcatcaagtcagttaattcagttatataaacttgaccttaacctcttcctctcaacttattctcatttcagagagatttcaacagatacaagaaaaaaaaagttacagaggtaatgcttttctcagaatctgctgtcttacaagccaataattttaactgattccattaaacacaatttactagctttaggaatccttttgtttttcctcttgctttcctttacatgaaatgagaacacacactataaaatcttaatcacataaaatgtctactctgaattgaatacgttatgctaagtaattcagcctcaacttcacaactccaaatacttaaacaaaattccttccaacaatatactagtgatttttattagtgaaaaaatatgtacttctaaaaaaataaagctaaatgtttttccttcatacttttcagggcactataacagagatttttttctctcctaggtgaaaattatgcgtgctcttcctaagatagatgtaaaagtcttcttacattaaaattacaaagatcagattccgaaacaccgcttgttcattacctcccttcatactgatggaaagtctgctatgtaagagacattgtcactggacatgaggttgtagacactaaaatgagggggaagaaaaggaacaagcaaaatcatacagcaagcactgcatacatccatagccatagtaaggaaggttaaaagtagagccaataaagagatttgaataattatatccaagaagtcaaagtctcctggaagtacggtatgacataagttttgaaggacaaatttgagtttgtcacctgaatggagagaacaaggatatatccatcacaaaataaacaaacaaaattctgaaacaaaaaaacaacattgtgtcatggaggatgaaactaacggtgtgtttggaaactgcaggcattttaggaggcttgaatatcaagtgtgaaaagaagagtagaaatgaggctacaaaagtgagaagggcattggcactgccctttgaagtaatggtggatcatctaagaaaatgtaggggcagcggctgagtggtgaaagggaatagattggctccttggagctcgaggaacggtagtcaagagaaaggagaactggaaccatctacagagaggaactaagaacccagggcactgcagagggatccctgactttgaaagagagaggaagttggctttgtgacatttggacaccattcattcattcacaaacattaagtagctgctatgtgccagcactgggctgggtgttcaaagtggaagacaattaaaacaccaggttttcttttattagtttcctattgcagcttcaacaaattaccataaatgatgacttaaaacaacacaaatttattattttctagttctggaggtcagaagtccaaatgcatgttactgggctagagtcagcatgttggcaggactgaatttccttctgaaggtttgaggggaacatctattttcttgccttttccatcttcttgaggatgcctgcttctcttggcttgtggcctctctgtccgtcttcaaacccagcaatggctagtcagatctttctcacatcacatcactctaaacagacaaccctgcctccttcttctgcttttagggatcctgtgattacatgggtccacttggatgttccaggatatttttcccaccacatggtcagctgattagcaagcttagtttcatctgcaaccttaattcctccttgccatgtagcataacactttcacaggtcccagcgatgagaacttgaacatctttgatgggggagccattatgctgcccaccacacttgtcttggaagtttatggtctaataccaaaagactctggaaagacgcacaacccaccgaagccacatgaatctgacaaggcaggcttgaggagagaaaaatacctgttccatcaactggtctgtggacagggcagaatgcaaggcccaatccactcaagatcaaatgaggccaaaactgagcaatgataccttacagattcatcagaatagagaaacagactttttactttatttaggttatcttctgttagagatggaatagcctggtaaaactacagaaggaaattcatcattaaatagaacaagaatcaaagatcaagcaagtttgatgatcttttccaggtgagataaacagtgaactctcagtagacaacgttttcctgttgctaggccgactagctgtggtggctgagttgtttatctttaagaaaacatacctatatctttttacttgacaactacaatataatctgtctgggagttgttcatcatttaagaaagggtgaaaaaagtcttctcccagaaagtgttcaaatccgtgaggcgaaatgatgataacatcatgagaggcatcataatttatctggagcatgtaaatcaccgggggccccctctgaggatgctcgctaaaatgataaatagctttgtgagctgtaagatcaacccccaggaattcaccagcgagcctgtgacaggagagttgcctcccggtctctcctggttgggaagaggcaatgacttaacagatttgaaaattcgtttttttaaccacttgttaaaacattctatttaagactttacccacaaaggcacagtctggaaagagctgaacaaattatcccaggacactgatcaaaatagaagctggtatgggtaggtctggcctgccaaacattttttttttcacccgatgtattctgctacatctcaacttgctgtctttttgccagtgtaactggtcttgtagccaaataattctccattttcctagacaatagggctctaatgtgtctacaaacccctgctgtctcctgaacaacatggaagtgaaagtgttggaaaaagggaaatgttattttgtgtgttctattttagaaaacctaacatttatagtaaaagatcaatagataacagtacatggaggttttcaccgtattactctgtgtaggtgaggatgatgtaattcttttcagtttgagtaactattattggctgaatgtttgtgtcccctccaaattcctgtgttgaagccttggcccctgatgtgatggtatttggaggttgggcctttgggaggtaattaggattagatgaggtcatgagtatggggccctcgtgataggattagtgcccttataagaagaagacaggtctatctctctctctctctctccatgtgcatgcacagaggaaaggccacgtgagtgctcagtgagaaggcagctgtccacaagctacgaaacagaccctcactaggaattgaatctgttggtaccatgatcttgcactttccaggttccagaactgtgagaaatcaatgtctgttgtttaagccacccattctgtggtatttttgttatggcatcctgaactaagacagtcgtttaagagtaaaattttcttattaattttcatattgtctgcatcatttgtcatggtgctttgaatactgaaaaccctcagtaagatattattattaaaaataatgaatgataatggtgatcataggagataagaaatgagtgcttactctgtgtcaggggctgtgttaacacattacatattttatcttaattctcacaggagccatctgtggtaggtgttatgatctatccatgttataactagggaattaaactttgaaaaattaaaatagacctgtttcaagtctcccagctaggaagccatggagttgtgatgtgacctcaggtgttcttgactccagagtgagaatcttaatctgtgcccacctatatatgaatttcctagggctgccataacaaattactgcaaactggtggcttaaaacaagagaaatttattctgtcacagttctggaggctggctaggatcaaggtgtcagaggaccatgcaccctctaaaggctgtaaggaaaagtacttccttgcctcttcctacattctggtggatcccagcaatccttggccttccttgccttgtagacccaacattcaatctctgcctccatcctcacatgacctacctccccgtgtctctgtatgtgtcctctcttcttcatataaggacatcattcattgggtttagggtacactctagtcccatatgaccttatattaactaattaagtctgcaaagactctatttccaaataaagttgcatactgaggtttagatagacatgaattggggggggtgggcggtgaggatactattcaacccactacactgatctttccatctcatcttccttcactccctgatccgagcatctcctttcttgagaggcgtatctcttattcatcttccttactcactatgcacatttctccttctgctccttattcacattattactcctgctaaaaatgtcccttctgctcatctatacagacataccttcaagtagtagctttaaacctaaccctatcattacatgtttatttcttgtcttatctatgtcatttactcagtacagaatcataaattctttccagagacttacattttatcactgttgaacctttgcactgctgattagaatttcaagtctccaccattggcttgttgccaatgggatcttgggttacttgggatctggatctgctgtgctttactccttggtgtccactctgttgcttagcatggtgcccaacagagacaacaaagtacacgtgcaatgaacatttgtcagatggctagatggagagatgggtggatggtactgtgtcctcttgtcaatagtacaccatctccaagttgcctttatagtaacgaagaagaatgagccatgtgcattgggttgggcccagcatgaaagaggtactgcaaacatgtgcattcccttcctcagaacacaggttctgggactgtcaagaaggagaaaacacagactgccatggtggagtgcacagtctaaatgctccagtttgagtgagagaaggaggagagttgagtgagaaagaacagtgtctgagaagccatgtcataatctccttcacatatttattgacctttaatccctagttagctgacatctctgctcctgcccaagacagtaactcttgtaactctgacctttagaattcacacaaaagaaaagggttgcctttattaagacaaaacacaggactctagagccagccctgatggcttagcagttaaagtttggtgggctccacttcagcggcccaggtttggttcctgggtgtggaaccacaccactcgcccatcagtggccatgctgtggtggcagctcatgtagaagaactggaaggacttacaagtagaatatacaactatgtacagggctttggggagggaaaaaaacgagagaggaagatcggcaacagatggtagctcagagtaaatctttcccagcaaaaaaatcgccaaaaccaggactttataggggtttatttttgttttgttttgttttgtttttggtgaggaagattggccctgagctaacatctgttgccaatctccctcttttggcttgaggaagattatccctgagctaacacctatgccaatcttcctctattttgtgtgtgggatgctgccacagcatggcttgatgagaggtgtgaaggtttgcaccctggatctgaattagtgaaccctgggccaccaaagcagagcccacaaacttaaccactacactatcgggtggggtccaggactctacagtttttaaccaagtggaacaagttaggttgtggttgctgaaaaagcaaggccagaacttgtgcttttgggagtctcctcatagccatcctccataggggcagccctgctccttgtacagaactcaggacttgacatcaacgcaactcctgcccatggtttaatcttagcataagtgaaacatgctggcattttcaacactgagttcactaaattctaagggatataagcaagacaaaaatttaaggaaaataaggagggaggaggaaagggagaagaaggcaaaggaaaagaagaaaagcaaagaggaaggagagagctacttaaaagtctctaaaattacactgtggcgcactggaaacgggactgcgtggtgggtgctccacagactttggggtcaggcctgccaggcttctgggttctgctctgctccctccactcacaccctgtccactttggaccagggccctttgcggccaccttgcttgattttctcccaggcagcttcccttctgcctgcatactgtgggtgccaccttctttcctactctctcagagtcaagtgcctcaattagtatttcttccaacaagctcaaaaggccacatgccctttcattttggaacttgggtccctcctttctctttctgttcctaactacgagaatctcatctggagctaactgggaggatggtagtacctgccaaggtaatcatggtagagtgaggcctcattcaggcgtgtctgtctgtctgtcttcactgattcattcaactatcctgaatgaagccttttgcttagtcctgggaacagaaagtcgaagaagacaaattcaagatctcaaggtatttacagtgtaagatgcagagaattaaattagtaattacagagaagggtgctaagtgctgagaaggaggcatgcaccaggtcttcaggtaccaaaaaagagactcatcgacgttattctagatgtgtgggcttatggaagacttctcaaaagttgtacaattctcattcattatgttccacactatgatcagacctttcccatacaagaaccaaagttctttcggcaggaaatatagtcaaccaccttaaaaacgacagctctttgataacttcattgcatgtatcttacatgcagcaggaggaagtggcatgtctctagcacctgcctccctgagttgttcctgtgggaaatcagacaaagtctaggagtgtgtattggtttgctagggctgccatagcaaagggccacagactgggtagcttaaacaacagaaacttattttctgatagttctacagaaggttctaagtccaagatcaagatgtcaccagggttggttgcttctgaggtctctctccttgacttgtagatggctgtcttctcctagtgccttcacatggtctcccccatgtccaaatttcccctttatagaaggacatcagtcatactagattaaagcccactcaaattacctcattttaacttaattacctctttaaagaacttatccctgaatacagtcacactctgaggtcctggggattaggactgcaacatatgaatcttgtgtgcacacgattcagcccatcacaggatgactgaggaggtgtggacttcagagccagtcccacatgggttcaggactcagctcaacttgtgtactctccggaagtcgtctccacactctggccttagttatgcttattatgaaggagaatgaatgagactttgcaaggggtgtgccacacttagagctggtgcctggcaaagagcagctccttgataaatggtagctgttgttccactgctaatgctcagtgtccccatagatagttgatgatgcttctctggacagcagacccgctcccatggctgcttctttctctgctaagtgtcctgtaactagaggacctgtataagaacgtttgcccccagattcctgccactcttatcagcacaatttggacaatgagaagttttctggtctccgttttgtcttggttccagggactgaccctgtactttgtgaacctctccctgactcttactggaaattaaataaaaaaggagagagagagaagactgtggtgtttgccttccagtaatataatggagtctgtttccttggggtttggcagaaagaggtgctggtggcaacatgacagggtcatgccctcttgcccatggttgctgtttcagtcgaggcctcccctaaacacagactggggccgtggggagcccacaatacaacctgtcaccgggaagccctgggaaacacaaattgcattttggaacaaaacaaacaaacatcagccttagaatactctcatgcccaaggtcatttgtgtcacccacatggcctgtgggaccccaaagaaatataaaaccattgagcggccctttgatcacgcacctcctttggaacgttttaatcaattaatcatgaagtcctttcactttgcttatgcaggcctatatataaaatgactttggtctggctgacactttactgcatccaagatcaaagattgaagcaaatacgaaattcagccaagataattctgaggcttttccccagcacactcctcccccagctcttagaagcacttttctctcaaggacagaaaggggagatttgggatgctgatggacacaatttaagtttcatgaggatttaaggagcccattaggataagaggcaagctggtggccagctgaggacaccgggataaactcagctagaacagagtccattttaaaagtttaaaatatgcgtgagagaaaaaaataaaatacactttctgaagagtggccccctgtttaggaaatcaggacagagctatgagattaattaggtatatgaaagcaggcactgaatcaggattgcagtctaagctaatcacttgctactcatgatagacgatgctgtcattctcaggaataaaactccttcccaggcatgtgtgcatcagtgagtggatgcagctatggaagggtggttcccaccattttgccgcgaagggagagctgaaaatgatcctatcgagggagctactgtgtcttgggtccatggtaggaactttatgtcttgtctcaatgttcatcaacacaataaccctggggaaggcacaatatattatcaacattctcagaggatgaacccaaatctcagagcagttcaaagacttgctcatggtcagacagtgactccaaaactccagctcgttaataacatccacttgtcatcactcacttgtgtaatttttcacctataggcttcatcgtgtgaaagatttgctccaccatacaacctcaaataatttattttcttgatttcaaatacagacatctataactgctgatcataagcttttggtcagcatgagctaaccatgtcatgtcagcatgacctaaccagtgtcgtggcactgagctcgtaaattcccaatgaaaagggaagaaagtgcagactcatggcaggaaaataaatgatatcttcctgaaagattgaaaataatcataactcttttttaaacaccttctatatactagatgtggttctgtgcaccttactcatcttaacattaatccttcctaggccctgtgacagacatttctatccccattctacagatacagaaccaaggctcaataaggggaaaaaagttcctcagtctttctcagcttggatttgaatctcaagtccctttcacatagcttctggatcttcattaattgtcttgttaggatactgcggttacagaatccagactggaaggatttgatgtaggaactactattacagcctttaaaaaaaatcatattcttaaaaagtccttccagaatttgaagagttctgcaagatgaaggggcctcactgaatcacgggggtctagcccttgacccggatggctggatgtgaattcccagtggatttccaacacatgaagctccatgaagccagcatcagcacactgaatgggccgttaagtttaattcctatttcatattgaaagtatttcctaacgctgttcccaatagaaaagacaaagggttatttagaagctttttaaaataagtggctctaaatactgtcaaattaggcaaaagaaaaatcacaaaagaaaaaagtaaaataggctttcagtccaattccaagaagaatcaagaagctggagatacacacagagtccaaatgggcagagctgagccactgtcatcatgtgaagcaaagtggaaagtttggggtgaggtttggaaaggaagagagcatggctgtgtggcttggggattgtggtccagagagttggatagagaaaaatcccccctgtattgagtcatcctcaacagcacatgtggtaggaaccgggattagaagcgctgaggggactagaagcagcagatgtcaatgtggtcagcggggcaacttgattgaccaagaattctgaaaaacaggagcgtggcttaggttcatgatccaggaggaaaccagtgagcagaggtggttccagtacagtaaccaaagcactggatgaggatgttcttgtgtgttctggttgggtttggaatctcccttttaaggagaaagtagctatctcaaaaaaaaaaaaatcagcataaacactccacatggagaataagacagaataataactaatatttattgactatttagttagtgcttattttaagtactccatgtagtataagttacaacaacaaccttgtaagatgggtactgtttacagacaaataaactgaggcattggggggtacattgacttgcccaaggtcacacggtatatatacgctggagttgggggttgaaaatcagacactggacatcagaggtcacccagtagccaccatattacaatggctcacactgtatattagagcaccggggtattcaaacagcttctgttcaatcagcgacccatccaatagaataagaaatttcactccagggtagggaacagaattgaatattctattatcatagtgtttaatttttacctgatgtggactctcttttctaaaacatagactttagagatcttagcctagtcctggttcatgattatgtgatcacctcaagagaatcaccttagtcaaacgtgaccaaacatttcatctctctggggagaagctgccccagggatgaataactggaggctcagtggccaggacaaagtagccacgcccttaaggagaacccttaaggagagacaaggaactcaccctgagcacctactgtgcatcaagcacccaggttagggcactcagtacccacattaatataagtgccatccaccctccggaggaaaatagaactgggcggcatcatcattccttatagctggaagctatatttgaccttgggggcatttggtcatgaacactgtcttttactcaattatcggtgccttttccccttgtcatagtgcctcccaaaggcaggggaaacttgaaaaatgaaaaccttacgtggtcaggttacataaccttagtagcctgctctgcagttcttatcaaaacatgaactgtgacaaaaaataaattcagtattcatggatgattaactaaagcagaggtcttcgaagttttttgatcatataaatatgttaaagaaattttttagcatatttgaccaatataggcatattcacttattaatagattatatccatgtactattaggaaaatatatttgttgtggaacaaatagaaacagaataggatgggataaaaataaagatagttgaaatctgcagtattttctccccttgtcccttggaatgttctgcacgcatcctggggtgtttgcactcccttttggagagcaaagccatgaaagatgtgttcattcattcctgtgggtctttgactgttgtccctgggtcaagttaaataatcggaatgctgcttacttggattacattttgttgatccttatagaattgggtgttttttttccatatttggtatgggttgtttgtccctgaggcaaattaacaagagatggttctagaaaatgtcatactcaattgagagctttggttgagaatgtgacccacttcctaaaccattgtccctttcctaagattgttctcaagcttcagtgtcaggaaattctgggtttctccagacaactgttacgttttcattttctggacatgggctgtgatcatgtttcccactgttttggccactggctttctcagaatttaatgtgccagtctctttaccatttttcgaggctttaagacagtcatgtattaaatacttcgactctctcattagcgaaacctcatttcaccttactctcatttatttatcttattgagaaaattacatgagaagagctactatttactgagcttgtactatggttgtaccaggcatattttgggagactttctatacattatttacttgtaacagttacacagtaaagcaaatagtattctccacatttcaagatgagaaaactcagatttgtttgactccaaagctagtgttttctttccacttttgttgtagatgcaatttggcaatctacctcaagtccattttagaaaccaaggctcattaatcaacaaatcaatgaagataagccaaacaactcctggattctaaacttatatttacaagcaatgtcatgttgactctacataaatgaaaaatctcatttcaaattctgacattcctagatcggccacaaggacaattgtctgatgtggggagactagctgtccatttcctaaaatcagttcctctttttcccaggaaacagctagccttcctctcccagccccctggaaattagatgtggccatgagactgcattctagccgatgtgatgtcatcagaagtgaagagcaacacttccagagcaggcccaaaaagccctccctggacaatgctcactgcctttcctccagggagatgcagctcatcacagtcttgttgaccatgcagagccacaaggtggaaggagcctgggtccctgactgccccttggaagagaactccatgatcatgaagaacaccctttttcattttacctgaatgagaaattaattcctattttggaaagctctgagatttggggttacttgctatagtggctaatttccttctttataaattgggatatcagtaatatttattccgcagggttattgtggagactaaatgagacaatgcatgtaaatatgatgtctgggatatagcaggtgttccatcagttattgtaattactgtaatgataattacataactcaagtgtcatcaagctgtgcagaattctgagtagccctcgtctttcaggaattctggcctcctgtcaaggttgctaagtgtccctgggggaattccattttcctgataatcacctgtcctaggtttcttccggattaattctggtcacatccttacttcactccctgatgctttcaccttccttagtttacctcactccacactttattcaaaagtcagtgctaacacagagctgataccaggcgttaccagaagactttggaatagagaaaggaaacatatcacaacacagtaagaaaactttaagctggcttctggacttcatttctctgaaagtttctcagccatgttccatgtcacaagtttcctttgggccatttctatctctatctctggaacctcttataggtcagcagccccactcaaatcacagtcccctctcctccagttccttcccagtgcaaggccctcaaacccctatgccaggcctccagagaaaaatgtagaaatatcttagtaataatcacaaatctcccataacagaaaaaaccatgcttgctagaaccactactaccctggtctgccctcccagcctttcacatgattaaataattaacattctcgtttgcagtatttgcattagagtttcagcatcaaagtgcagagctaccataaagtgatagaatagacccctgacttacaagggcgtgacagcagggtttgccaaagtgagcctttctagaaagaagggaagaaaaacgtggcttctactttgagtcacaagcaaattccatgcacttttagaatcttccttttgtcctaccatccagccttctttctattcctccagctcctctgctcttcttgacccagagctttgacacaaactatcagcctaaacagaaacagtccttcatcaggttttaacaaggctctttgtcattcaacctaaatgctgctttctccttcaagagaccacacacagctccctcaatctgcccatgtccttggcgtcctttatacttttccagcttgttattcataaaacttaccactatctagagcagtgttctccaatagaattttctgtaataatgtaaatgttctttatctacactgtcgaacatgatagctacaagtcacatgtggctatggagctcttaaaatgtgctggttttaatatcttataggttcccctgttaactcacatgttaaaatctttgtcgtgtgttcatttagatttatatgagagacttgcatttatctttttgaaaattatactgtggcagtaatgaaaggtctacaatgaattcatcagaaatgttcctcctcggaaacacacgtcatccttaaatctggaccactataacaaatgcttacaacattctgaagtcaacacaggcagcactggggactcgaagtgaatcccaagtatcgcattatctaattgggacagcacttgaaaaggcatgaagtaataattatcattcttccattttttttaaggcagaagacccctatacacataggaaacctctataaagggagacagaagaaaataaaagcgaggctgccctcactaacgtggagaaggtgcgggtggtgtgctggaagtctggcttttcagcctcttcctcattccacctccatcctctttgccactttaatgattctaatacccagttccgatctgcctgtgtgggcaggggtgtgggggtgggagtggggcagggggagagttccacactaccaagccattctgcaacaccagctgggtgtcctacagttcgattcaattctgacactatctacccagagatagcatcagatctcacaggttgagggctcagtcccacaagactgccccccaacccccgcttcagatgccaatggcacatccaggttgtcacctgtgttctgacccaatggctatgaatcagaagttcccatgactccctccttgggttttcttaatttgctaggtggcacacagaactcaggaaactcctttactcactggtttattacaaaagatattaaaggatagaaagagatgcacagggcaaggcatggggaaggggcacagagctaccctgcctctgcaaatacaccactctcctcaaatctccacctgttcaccaacccggaagctatccaaccctatctttttggatttttattggggcttcattgcataagcatgattgattaactgattggttgttgttgactgattccacctccagtctcatccctaggatgggtcctaatgtcacttcattaacataatgaaagacacctttatggctctcctcatgtgggaaattcaagggttttaggatttctgtgccaggaacaagggaggaagaccaaataccaccatatatgtttcttttttttttttttaaagattggcacccgggctaacaactgttgtcaatcttttccttttttttcctgctttatctccccaaaccacccctgtacacagttgtatatcttagtcgcaggtccttctagttgtgggatgtgggacactgcctcaacgtggcctgacgagcagtgccatgtccgcgcccaggatccgaaccctgggccgccacagtggagcgcatgaacttaaccactcggccatggagtcggcccctatatttcttattataaatcacaatatcacacacctccatgaccacagtttgaaacctactgacctgtaccaatgtgttgtgcccactcagtgtctcctatccacattcctaaactacatctcccctcccctgtgttcttaaatcagcccctttattgccatttcctccatttatcacatagtcttgaaagtctactaagtgtgaaacactgagctaaatgcttttagaaatacaaataagaatcggatgaaaaaccttcctcttctaatcgatcctcaagaaggagagatgatgttgtacattgataagagcaatggaaagtagaaagtggttgaagctgctgggaagttacatattattcttgtatttcccttccaagattttggtttctgaggaaattctgtagggtaagaaaggaagggggatggcaaggggatgtctgagtctctatgtctctgacatgggaaagtactagaatcataaatatagtcataacatttaaaaactcccactgaatgaagacttgctcaggctgcaggaactgttctgagcgctgcaagtgttctagtcaataacctcacaatgacctggatggtagctatatccttatcttcggtttacaaatgagagaactgaagcgcaggcagcttgagtaacgtgcccaaggtcacaatttcagcatggacaaaactaggacttgaaccttggctgggtaacttctgacttggtccacaatcccatttctcaccagggaaatgatcctctgattaaatttccaattttcatcaaacatattgattccttcatgggacaaatatcctgaacggctactccaggccaggcattgagcacatcacagagaagaagatactcttggcccacagaacttgtggtctggatgaggaaaaagacaagaaaactttcagttctaattcaatgaatgcagtataacaaatgctacaataagagtaatcaagaattatgagaaagggctaagttttatttccatagtgatttgcagtttacaaagtgctttcatatgcaatatcccctttaatattcacatgcaaaaaaatagcaatgaggtagggcgggtctggactaatatctctatgtaatgagatggagaaaatttattcaaaggaatccatctttcgaaagccattgtattttggaaaggaaagagactgatttagaagatgagtcagaaaaagggcatggttttggggaaaacagtttgcttcagacaaagaaatatttgctttctcttctggagagggagcaagagagggagagagggaggcagggaggaagggagaaagggtgggaaatgctgaggaaggagttggggagataagaaaaaccagttctgcaatgcaaacttctcttttaagccctggtatctgtagcaaagtgctcctcaaacacagactccagttcccataacattgacccttattttcaattataaaagtataaatggtcagtgagcaaaatatggaaaatgcacgctggtataaaataggcctattaaccaaaagatcactgttcacattttatagtttctccttccaacctttactttcacatgttatagtacaaaactaggatgaaaccccttaagctattctgtggcccacttttctcacttaatatgttgtgagcgtttccccaaatatcttcgtgttctctgagtatttgctcccctccagagtcaaatccacagcctccctttgtacacctgggcctttcacaaagcatctcccttggtttcctccctgagcttcaggacagcttcttcgacttgggagggacggctgttctcacctcgcccaaccgatgaggaaatccaggcctgttgtcaagagtttagctaatctgctccacaatattgctgctttggcatccattttgtttggccaagtaagctgtgggggccttaaactgacattagctgccccaacccccaccccacgcaagcacatgctctagggaacagctcccagagtcacgagcaaatgtaagttcctgatgtgacttccccgatagcccttgtgagcaacagtttcccctgcctcccagggccttcctcttgtgcgcccctgagatgagccccctgtggagcttaccaaaaccctgctggttttggtttgagttgaccaatctggcgttagcctgggaatcccaaaacacttcattcacagaacctaataaagacgtgtgccccaggtcctgcctctgcctctgcctgcatcctgccttgtctccccatgtggctccttgaggcatgctgtgcacttcctccaggacttgtgagtaatgaacttctctatttgcatttctcttgttgttgaatgctgctcatcatctgccaccctgtgctccacttaacaaacaccaatttaacaaaaagtcataacacctgtccaggttaaacaacttgcctaagggtaatagaaggtcaataagagagaacaggaatgcaggttagcccctcaagttgcttgaaaacctgactatgagagtgtccatccggaatatatatctagatagtctgcacaaaatccatagcacactattgttgtgcaaacacacccatatttccaaccctacttggcaagcctgtaaaagaaaaattttgcctggacacttgttaaaaatggcaaggaaggggccggcctggtggcacagcagttaagttatcacattcctcttcggtcgcccagggttccccggttcagatcctgggtgcggacacggcaccactaagcaagccatgctgtggcaggcgtcccacatataaagtagaggaagatgggtatggatcttggctcagggccagtcttcctcagcaaaaagaggaggattggcagcagatgctagctcagagctaatcttcctcaaaaaaaaaaaaaaaaaggcaaggaagactttattcaagactattgcaatagaggagagggattgcattcaactttgaatacaataggaacaagtggggatttataatagtccatcggctgggtgagagattcaatggaaaattactaagaagaactttgttaggtattaaggggtagggtgagaagaaattgattagagatcaggatgtaggaaaagaagtttgattggctatcaacggtgggagggagtcttgataaactgactgagcaagagtctttgtttgcactaagctcagcaggcaaaggacaagacctagtcaggaagtgggctcaaaggagcctgactgaagtttggtcaaggaagtggttcttgtgctactgccatgaggtcctcatgtggcccctgggctctccttggttttctccaactgtgactgtgactttccctcttttatacatcccttcctcttggaaactgagaagtctgcaacctgcagcaatcactttctttggcagctgttgcatttgtcctgggctggtccaaggccagggagcagagggttagaggcaggagagtggtcgtagggatggctgatggtggccggggagaggggaggattagctgggaatttacccacgtggtatcaacttttttcccctgggaaaatgctttttgagttttgaatatcagggaatttactccacagagttgagagctgagctgccttcgtgctcccaggatatctccttaacgaaaatacaatgattttgcagaaactttttccgtacagagtcctattatgtttgcatgcatatttatccaaaggcataacccaggagagaacactgctactgtcctgtaggtctagacacgttgattgtgcaggtgatcataaaaatcagtactctgccctcgtttggggaccattactgtgactttaacattcaagatatatcactttcccagaaaaggcagcccgagtgtagacaccaagtctttggatgattaatgattagaatcccttaagagtgagctgtggaggagccagacaaaatgaaattaaaatgttgcctgttacctaacatttcctcagatggctcagaaattccctgtatgtttgtcatttattgtatcctcttaaaagtcagttacatttccaaatatctgaaaggttagtgagaatcttgattgaggtagggtttttttttttcttttttcccaaatgatgattgtctttaagattaatgttccagtattccatgaatctctgtttctcaacaagaaaaaattgatacaaatactcataccataagaatgctgtaagaatgaataaaataacatagaggaacctcctagtgcagggcctagcacatagtaggttctcaataatggtaggcattgttatcattattatgtgctatggatagttggtgttttggtttatccagaatctagttcctgtgattgaatcagttcttggaattcttttatcaacacctctcaattcctcctctactctgagtttaattggttcacatcatattgagaaaataataccttagcaaacagtaataataatagtagctaattatttaccaaaagtttattaggtgccaggcattgctctaagcacttttcatggattgtctcatttactctccacaaccaccccatgaaggagtgcacttgggaaggcaaggaaatatgctgttacacagggtttcacaatattaaagggcacagaagcttatttctctcttctgtaagagtcatgatgaaaggggtccaggtcagcagagtcagctctcttctatgtggccgttcagagactcagttcctccgtcctggtttctaaggcattctcagggcatcatcctcatctgcatggtcacagctgaatgtctgcgatgtttatgtttcagctgtttagatggtgataaagagcatggaaaaaatatgcccgataccttaatgcccaggtctgaaagaggctcacatccctcccactacattctgttggtcagaacttagtcacatggacacacttaatgaaggaggctgggaaatgtagtctagctgggcacaagtctcgtctatgactgaagaacagaatagatttcagtaggcaccaggagttacaagtattagaggaaatacaggtaatttggctaaacaattattcactcagtttcgtggggtgaggaaacagtcttagagagattacatcactgcaggagattctgcctgtaaaccatccacagacataatcctaccagacagtttctgtacatatcactttccagagtctctgcctgagagagatttccagccatgggaacaggggtggccagctcttccagactggacgaacacactacctcctctagtttgttcatgttgacgtgaactatctcatccattggaagagtcattgccaccgtcttctaaattctaatttttgtcactgagaagtatgctctcagtaaaaatgtgaataattatatacttagtaggtgatcttttcttctctggctggcttcttttaggatcttcttattgtctttcatgttttgcgatttgatcgatgaggtcaatagaaagatgacagctctcttatttgtcaattcattttacttaggaaatgtggccaccaattaacctgagaagcacagcctggggcatgcccatgtggtttgcatttggcgtccccaggtggacagcctttctgacagccctgcaatgggcatctgtcttctctcaggtgtcaaccccaaccccagctgcctatgacatcctcctcttctcagtgccagaatggaataatgactttgattctctttttcacattatttctgccagacaaatgccacctcctccaggaagcctctgttactctctttgacccaattgactatatcactcacttctctctgctactgtaattattttacttatacctatgtaggaaactagaacatgtctgctcaaaataggcccttttgacataaaaattatgttgagctgcaggcaattaagaaggagcaaatgcaggaaaagctctctctgccctccccttttctgtctaaaggcaggatataaagtctccttttactggagacagactctaattgggccagagaaggcatgagaagaagctgccaatgaaacttacactgttagtttcctcctgtatatttaccttcccacagtttgctgcccttggaagcctaaaaccactttgcattgtcccgtcatttttttttttaagatttttttttttttcctttttctccccaaagccccccggtacatagttgtatattcttagttgtgggtgcttctagttgtggcatgtgggatgctgcctcagcgtggtttgatgagcagtgccatgtccgcgcccaggatccgaaccaacgaaacaccgggccgcctgcagtggagcatgtgaacttaaccactcagccacggggccagcccctgtcctgtcattttttaaaaaatttattgttctttgttgaagataccatgtaagccgaaattctaagccactgctttgttacttttccttgaggcttctcctgcatgatgtgctctgcgcatgtcaataaactgtttttctcctgttaatctgtctttttaagacagctgaagagctgacagctgaaaacctaagataggtagaggcaaagctttgcctcctttccacctatcatactgtgatgttatttattgcctaaatgtctgctcccttaccaaactaggaattacctgatgactgacgtcccagtgtgttcgtgtttacttaatcctgagtaaggggcctggagatattttgtcattaactcatctattgattcagctaatgtttattgagtaccagccctgtaccagcaccatcctatcccaatgctacagcagagaagaggacccagtggcaggaagtttccgttgaatagtagagaattctttctttaaccttttacagctttttgtccatgttgcagttatggtacatacttaccactttgggggcaattatttgatcatgtgtccacgtcttcaatgtgactgctatttcttccaggacagagaccaacagcttatttattttgtatctcaattatctagcacaggggttggcaaactttggcctacaggccaaatttggcttgttatctgtttttgtatggcctgtgaggtaaggatggttttgacctttttatttatttatttattttagtgaggaagattggccctgagctaacatctgttgccaatcttcctctttttgcttaaggaagattgttgctgcgctaacatccgtgccaatccttattcgctttgtatgtgggatgccaccacagcaaagcttgatgagtggtgtgcaggtctgtgcccaggatctgaactggcgaaccccaggctgtggaagcggaacatgcaaacttaaccactatgccaccaggccaggtctggctttggcagttttaagtgtttgaaaaaaatcaaaagaagaataatattttgtaaagtaaaaattacacaaaatgtaagtttcattgtctatagatcaagttttattggaatacagtctctcattcatttacgtattatctgtggctatcatttacaaattaacaatggcagagttgagtggttgcaaaagagaaattatggccacaagactaaaaatatttactgttttgctatttacagaaaaaaatttgcagacccctaatctggcacattaaccttctttagataaattatgctggcgttgactccaggagcaggtaagttctggtccaggaggagagaggagaaggaggaaaacccgagcaatactgtgataaataaacctcaccttttgggtgccctgtagttggtggtactaatggggtctctctcaaggaataggaaacactgtactaagtcctggatctggcttcttttttccccagaacgtaaggtaagccttattctgctactatctccgttgtcactctggaagagcagtaagaacttgtgatctcatcacagaatactggttgccaagaggaggaaacaagtcctactggatggagggaaatggaaggcaggattactgaagacggagggaggtgaagggcaaagctgttgaagggagagggaggagctggggaggggaaggaagcagacgttttccttaacctctcttaaaatatgagtatttggggactgattatgctttcagtcaacatccaatctctcttaaaaatattcaatgacttcatctttgactttgaataaaatttcaaatcccatcctttacaaagcccttcaggatcaagcaggccagcttcagattctttctgcaatcctagttgatgccacttcttccctatttgttctttagcgtcctgcgtcttttctgttcctcaaacacacttttctcaccatggggctctgtgaattgattctccttttttctagaatgttcttccttcttgattaagcaacttccttctcgattaagcaccttgtcatcttttgggtctcagctcaaacatcacctccacgctgaaaccttgcctgaccaccttacataaagcaggctcctttctattattatttgctattccaatagccctcacagaacttatcacaattttgaattatacaattatttgttggtttacttgattttttggcttccccactggaatgcaagtttgataagaggagaggccatctctcttttgttcagtattttatacccagcacctagtaccttcagctattcaaaatttatgaaacaactatgtattgggagtttccctaatctttggggatgcagagctacatacatgttgagtagcacacagtctactagggaaaactggtatttgagtagtaaagagcaagaaaaggacgaagattaagtagtaatggtctggagctatctgttttatgggaagataccagaggtggctttctttactttagagtttggcccacagttagtcactggccggtgcttcctttggcattttccatgcaaagggctaactgttgtcttagacactatttatgggaattaggctccaagatggccccagtgaccttcacctctagtattcatgcccttgtgtagtctcctcatatattgaatcagagctgatccttgttctgaatgctacaggagcgatagtgtgcaacattcaaggctaggtcttaaaaggcagcttccactgtgatgtcttggattgcttactctggggggaggtcaacaccatgcaaggaggacattcaagcagctctgtgagaggcccatatggagaagaactgaggcctctggccctcagccatccacagtcaatcaatccttcagatgatggcagccccagcccgtgaggactgacggtctaacccttccccaaatcctgtccaatagaaactgtgagagacaataaaaaaatgattattgattttttaagctactaagtcctgggatgatttgttatataacaattgataactaaaatatcattccttcttgtgatgatctggttggccagagcaataagcatatagcatcttcctcatttcttgctctacttgtggccaacacaaactactgtaggctgcagcaggccagagagaactgtctctgtctctgccctgatgagagatgccagatgtttgcacccaatttttgtgttcccccaaagttcagatgttgaagccccaaccctcaatgtgacagtatttggaggtggggcctttgggaggtgattagtgttagattgagtcataagggtagggccgtcatgagggtatcagaggccttataagaagaaagaaaaagatctctctctcccccaccgtgcatgcactgaagaaaagccatgagaggatatagagggaaggcggtcatccgcaagccagtaagacagctctcatcagaaacagaattggctggcacctagatcttggactttccagcttccataactgtgagaaacaaatttctgttttttaaatcaccctgtctatgatatcttgtcacagcagcctgagctgactaagacaccagataattcatctcttgctcttagaagaatgaaatgccctgagtcataagaggcctttgggttgccaaggtcaggacctttggggagaggaagctctattctccagtaaggaagtggtaatcatttctcttcctttttaagaggctaatgaggagactgcaggatcatgaaggaagaccatgaaaaggaaagtattgaggttttgagtctgtaagactgcctggatcctttgctgagggatgtgcatgagacctgtggccaaggtaaaggacaaacgtgaaggaactttctgccagtttctaaggcactaacaacacgaggctcaggcagtaatgacgggctcattcaagcaggctaccactctgctatcaaatctcattttaaaatgccaccctttccctccctgattttccccaggtggaagtttgcactttctggacctcagagtcctcttactgtggtccaacagtcttccgttcactacctgccttgaagacaagagtaatccaggttgtgttccccaggaagctgacactgcatgcctaaggtttctgcaggagtggtcttagagtcaccacccatggaaaggaaggaaaagaagcaggcctggccagggggggaagttatgctgtgatgctgtcttaaagaaggtttcagctgaccccagagggagctctgaagctggggtggcccttcagaaatgtcctgattgaggagaagcgatcagacatttatatttatatccgcctcgtctagtcgttgtgtgtagactgccctgaaaagagggtatgactttggaaacgatgcttctcttaagctaggcaagtccaaagtggtctgacagtggaggactgtccacgctcagaggtcacagtagctggcaggataagtcttttggtcctgaagtgtttctggcagatatgtcatagcgtccacatgagattgactagggcgtgctagtaaatcctgaggacaaggtggatacacacttctgttacattttaacaggaaagaaggaacatccaagctgaggtgaggaaaaggaatctggaaaagtaaccccctgttattctcaggccaacgatgtctttccagatgtgacttttttctatcatagatccactggtgagggtccatatgacagtcataactgcaattgcttctctgtgtatggagattctgctgttaagaggaataggatctgagtaaacaaaatgggagcacacaaagctgcaactaccattcctttagatttggatctcagccaattccttgagtaacttaacctttacctttattcctctatgaaggaagatttgacttctagaatcctgttagtctccctcaccttgtgaacccacacgtcatctggtctgtgagttgggccctccaaaatctcggcaaatgcagcttctttagctggagccaaaagctcagatgacaagacattatggggttttccttaatttattctgactttggaattagtgaattcatgggtgaaattttgttctaggaaaccacgtggtgtgtgtgtgtgtgtgtgtgtgtgtatcaggtccagaggagcagctccaggtctgactgacttgaactgatggtgcctcttgcctcttgcataagcctggctttcgagtgtcctaggtgattgctactcggatgcaaatcactacactccaactctttattctcagactctctcttctgttggtacaattgtgttaaggttctaaaatatggaagcatttagcagaaaggggggaaaaaggaaaatgaggttaaatgaggagacagagatacaggaatttccactgcattttctgagctgtgaggccaccatgccttttttgccaaatgataagagatttatttcctaatcaaacagagtattgtgcgtgtcattcagaaatgtgttcctgctcatttcacagctccaaaaaggagttgacaggcatcaaaagagaagaattgtagctaacataggaataataggaatgaaaaaatcaatgtggaggtgtaattgaaagtaagaactggtggtcgaggtaattgaacggtaatattgtgagcagaaaccaagtaggatcaagtaactgcaagaataggcaattcacagacatgcattcttgtcctctctcggataacgcgggcctctgagattgtgggcaaagacattatcagatctgctcaaagagaagttcctcattagtttttatccatgtcgttttttttttcccctcaaagaatgctttgagacctggaatgagtccaaggctgtgactttgcaactgctataactggactcgagcatgttcgatcctgaccttgtgactgtcttagaaacagaattcaattgctcctggtcggcccactcaatcaagacacacctgaccagaacgatgaccagaaatacttgagcagccacgtaaaactcatttcacctctctaggctgagttcccgggagaaaatttcagtgaaaagtactatttattttcctttaccaaacgagagagataaagaagatgattttaatgtgtttttattgggaaaatgagtgctattcaggagtatttttcaaaaaaccaaaataaactccccttgagaaagagtcattcctccagcattacctcatgaggccattcacagactttgcctatcaatactgctgaaatcaatatcacattatggtgagagtcaggagacctggattgtgtgaccttgggcaagtcacttaatctctctgccacaatctatgtgaacaaattgaaaataattctagtaacttcaagaagggagagtaagattaatgacagcaagtttttagatgattgtctctgtggctgcttctcccacaccctcatttcgtgtgtgtacttttttatgtttgattttctttagaatctaaattcagccacccacatattgactcaaagacaaaactaggaccaaatgcaggatggcaatgcctccacttggctgaattttgtgtctctggacacagttagcacttgtaagtgtcctctatttccccttcgtggaaggaagaggaaggcaacagagaagtccatttggaaaagaattgttatgtatatattactctctttattctgtttgggggatgttgtggcttcttgctctcaggcatcctatttcctcaaccccactgtatcagagcccccctttttacctctcattgttcaattagcccatggaattgaagacccagtttggtgttgctcttccagcttggatcagtatttcctccaggatacacctcaagtgtttgccctacaccttcacaagctgtgacaacaggtgataaatcattacttattgactcattcaatgagaaccctgtgacctctccaacccttccagttgtcatcctgactcgcctcttctttttcttttatactcattgagagggcggtctgttactaatttccattcctaaccctcggctatccagctactacctcatcactctattaaaactgcttttcttcatctccatgccagaagcactccattctagaaacgtgagcatgatctaaagttgaatcttattcctctggtcaacttcattctattgtgtctctaaattagctcatccattttcttggcttcaactatcacttctatgcagatgaatcttgtatctatggttttagacatcccagcccataatctgttttcaactatcctttcctaccatttgtcaatttaagagcatatatggacagcttgagagggtcactttgtgaggaatccgcaataccacactaaggagtttggattttactttacagattgattaaagatatctaattgaagatatttcaaggtattaaagacatgatctagaggaatatatatatagagagagccctatgcagtcaccgcgttgcaacgaaacccagatttcaattcttgtgctttagaaaccacagaaacaaacagacgggcttaaaacaaggaattatacttgattttccctttttccttgacaaacatgtccaatgtcatcatgaattattaattctttcactgtaacactacagtctgttcagtctcttctaattcacttgccattttttccctttttattcccaacccttacccttttttagacttaagaaatagacacctgatcaattcattttatattctgctatcatctaaaattcctatactacaggtctggacaaaccattctctaactcagacaatcttaatagacttctgttgcccacgagagaattctgaacttcttagtcctcaccctcaaatatggcctgtatatttccaccaccaggcttttgttcaaaccattttcttagcttaatagtgagtcaatgtaatgcagttgttctttgattttctgaattgataaagtacttccttcttcccatgattctaagcatgcattactaccatggccattccaggctcaatccatatctacagtggtttatttatagagactacatctctcaagatttagtgcaacactactggtcttccttagtattttttgcactgtttgggtttctttaatgataactggagcattccagtagatgaagaaagattttacttcattgattggcacccttaatgcacagataccttttgctcattttccaattgactcctttcctgagtgtccagacttgtatacagagaaaggaatgcatctgagttttaaagcatgggttggccagcagatgtttcttccaatccagcctcatcagagtttgagttcatgaaaattcctctgagactccagaaatattattcttaattttcagtgctgttgtaagtattcatattttctgtgtcttcagaggtatttcatttggaagttgaggaacggcattaaacacaactaactaggtgctattttaaaatgggaatccatttttgttgacattttaaaagctcactgcaaacagatgctcaaaagaaaaatacagactatatgaagtgagttaataaagctagaaaatggccattattgtattacacacatgaaataaatatgtgtaattttgcctcactctgcccacactaagttctttcatttctttgaccacataagagttctttctctccccaggcctacaaacaggctgctctctctgcatggacccctacctttgacccccacacacagtgccctctgcctccatcctagagcctactttatccttcatgacttggcttacatgtcatttcctcacaaaggcattccctaacctcccaatatctatttgattggattccactgctgtgcttttttctaggaccccataatttccttcagggagcttatcacaatctgaaattatatattatttgggtcatttgtataaaatcttttacccactttaacctcaactccaaatgcatagagagtgtgctttaaaatggcagaagcaatgtctgtttcatctgaaatgatatatcaaaagtttagcatagtttcttgcacaataggagatgaaaaataaaatttgttgttaaaccacttttgagtacatagagaggattaagaatgaaaatagcttatgtattttatatagctttatatactttatataaagctttatctaaagcttcatatactttttacagcttatatacttttaccaaaattgcttttaaaataatggtcactatatgaggcagatgacaccataacgttcaagatctttaagtcctgaatcgatttcaacagtctttcaaccatttctccagaaagaattgctgctgacaaagcaagccatctgaaaaagaaaacgctaggagcaattctaaaaccagggttagtctattattgcttagaaataatttcagaaaatctgtggtgaaaacaaattcccaagatggagatagttattacacaacaaacacatcttaaattgaacacatgtcaaatccccatggcatttcctgatggggcctcactcctgtgagaatttaaagtaaacagagtagggacatttaatcactttatctttcagattacacacgtacattattctgtgtagtagccttgattctgaaatgtgcaaaatgtttttgtttcaacatattgaattctgttggaaatgctctagaatagtttcctacttaaagaaattttatggtcaaggctttataagtgaggaaccttttataacatgaataattgcccttaatttatcccatttgctagtaattattcgcctattgaattttctcacagagggcttgtgcagaaagtagtcccgtcatgattcaaacaatcccctgagaaactcgctgactcagccccaattccaggcagacataattctattttgtgcctttatgagcaggaaggagaaaaaatataatctggaaactactaagacttcattttttccccttaaaaacaaaaacaaagcaaacatctctaatctagattacttaaattaacacgatcagtagagagaataactgtgctgtggaaataagcccccaaggcttaaaagtcccttagtagagagtagtagttactgacaatttagtagtagttacaggtagtaaccacggacaaacagttaacacagacaatgtggtctgaagggcctgaggcggaattcagctcctctgttttccagctgtttatgcctgagtaaagcaggcagcacaataatcccataggtttgtaagagatgaatgagatggttcatacaaagcccttggcatagtgcctggtgtataacaagccctaagaaagcagtggctattaggatcacacatacctataaacacagagctacagcatgtcatcctcacagatgtttctttgcttaatgaatgactcacaacccttgaaagaaagaagcaactgatgggaataaataaatgttttacgaagattatataatatttatataattaaaatgtacatattttaaacaagaatgaacaaatgattggacatgtgcatctgtgagtgagaatgtgtgtgtgtgtgtgtgagtgtgtgtttgcacacatgtgcatgactttcttacagggaaatgcagaaatcttcacctggtgggtgagtattaatattgcacccagccaacgtcatttccctgttctggatggtaccccttggtattaccaagccctgcctgagagggcccttggagaaaggcacttttggtcttttgttgttttccatttggttctaattgaggggaaaagaagaataaaaccaaaaaatactatttgtggttaagttagacttcaccttgtaatgttttgggaagaaattaattgaatatgcactttcttcatagcaaagaatgtgttcttctatccatctctttcatgtggccattccaaagtccccaagtgtgaccatatgctaatctcaaaccaatttctggcaacaagaaggtattagccttcttccctgttctttctgtatcactttaagaaattctgaaggaggagactctaaacattgtgcaatttctaagaaaaccaccaagctgttaatgaagtaaatatctgtttaatttacaaacatcagtagtgtaactgatattagtctggagaaagacaaagcacactgaattatacatgtacatctaattttctttgtaaaaaaagtttttggaaagaaacatctgcattttacagggtaccctgggattttaatgagggaagagcacagtccactataaatcattatcatctctacactgtaatttagcagcaaacatgttaacatgggaacattagggtaataaaggagctttattgtttggaaaaaaatcacagttcttgacattacagccttttctctccccaccccacccccaataaaagggcaaaaacgtcaaggaaatattaatttgtaaaagatctacttttctagtgtcgattgctacacaccatttctgttctgcgaggacctgttgcagaggggccacttctttctgtacaatgaccatttcacatatagactttacatactctctgcaggtgtcctgaatgaggccagtaggtcagtgacaccagtggtcagatgccaaggtaaacaaacagaccaacacatatttctcccaagataacaccctatgttagtactattgccagaaaaacaaagaatcctgatttttaagtttgaaaaatatacaaaaatatcaggacaattataaattaatatatattaaagcatcgagaaacagcaaaaggatggcctaaaatgttaagtacaatgtactttgatacaataaatatttctcattgaaactgaatactgtatagggctgtttagaactcatagaaacaaaaattcatattattactaatttatttatcaataatctattggttttttatcatctcctttatcatttatattacaaaaaattaatactggaaaacggtagataaacacttttgtgtgcttcttctgctaacatgctgacgtttaaaaagaataaaatttattttagcactcccatctgctctcatgaatggaacccaggtcttcaggacactatattttgcacaaaatatttctcgaccatttgttctatctgtgaattctggagttccattcctctgccttgcatcctcattcacacacatgtgcttggtctgtcctcgtgaaccgcagagatgcgaacgaggacacacggctgttacgctctgggcaatgtcacgtcagcgcacagtagcttgcctctcccttatggatgtgcttctgcttgtcttccacatgttacaaagacgactccgagttgcgatggttcccaacacggtcctcatgcctctaagtacatctttcttcctgcttctccagcaccggggaagctttagttcaagcatttctttttatttttccaaatgcagaaaaaaagtctttattctcataataaaaataagtctgttctgtattttacaatatatttcaaatatttccactatgaagcattaatgagtccaacatggtcaagaagtatacaccattttctaaagacaaaagcaaccaggggcgtgtttaggaggcgcacctggtacagccacatttcaccaccttctcaacctcgtccacaaaggaggacccgtcagtgcattcgaaagagtatttccgccgcttgctccgcagaggtccgcagcactgccctcccgcacacccgcctctgcactccaaccgggagaccttcttggtcgtttggcaggcggcatagccctgctgcttttggtaataatctcttatccgttcccctcgacaagatatttctagaaaagaagacagagcacaagcagtcactgtaagtcgcatggagtgacagagaagtcacaacccggctcaggagatgtcgcttttgcttcttatttgtaaatgctgttttcagcgttatgctcatattctatattatgggctggtggcacggcctactattctttcaaaaatacctctttttggcctttattttcagcaaagtgaatattatacatgtggactataaatactacgctattggactgacaagaaaattggattcctgaatctttccctttattgcaaaaatacacatcttctgtttttacactactaacagctggttttgtttaccgcagggagcggtttcagagagcacgcaatttaatttattagacctggagtttaatatcactcaatctgttacttaatacaaataacattccaccaacttcataaattaccctagtatgaactagttcaaaaagagacatctgctcaaagcttccacgggcacgttcctcttgtctcgtccctctgacacacacagcaaaatccgtgccagctggaggcagggcaggttctgatcacgcagaggaggaggactgtgggctaaaaggcagcccctttccacccctctcacctgcgtcacttgctgtgataaatcagtcgattctaaggtcaaaggtgattttgtcctaaaactagagcagaattcttagctccctcttctctgtgccagaagacgagttaataacatactgggatgagatcggcaggtaaaggtaagaagtgagcacagtgaacctgctttcacataaggcaaaaaggagtattttcatagcaaatcacactgtgagaagacatctaaaggtcgtgcaaaatcttgcagtggagggttaggacatttcgcatctggtggcttcagaatactgggaaataaatcaaagtagcaaccgctagtagtacagagacctggcacccccatatcgctcccctcagtctctctttctctccctctctttccaaagacgggggctcctcttgctttgccaagagagggaggtgcccagctgggttggcttacctcgatcacagctgtccccagtgtatccactgctgcactcacagtagggctgtccaagtcccgagagcctgcatttcccgtgcttacacttgatcgtctggcaggggttaaacagatcctcctcttcatcacagaggacgcccccgtggccctccagacacttacagctgtaggagaatgcattgatgggcaggcaggtgccatgtacgcatctacagtggaggaggaatgcaagaaaggagatgcattaagcagaggggatgagaatggagggaggacgatggaagaagtatgaaggagatggtgctaatcggctgacctccttctcttccctccctcctcgctcctgcctccctccctactccttccttcccttcttgggttttgctctgagggtgggggtatgtatatttaactaccaagcagcccaaacttacttatttccaagacaagggtcattggtcctctggtcacagaggggcccagtccatccttcctcgcactcacaggtgaagcccgactggctgctagggtggcacgtgccgtgggtgcacaccttcttgtggcatggctcacagcccggcagaattccggtttgcatgggcaccttgcggaagtcctgcagctcgctgttgatgtaaaggttcctgatgcagccgtggaagctggtgccattctgcccaggggactggcgcagtgctgcagccacattgttctttccaggcatgcctggggaggaacaccaagtcagaggtcaggctctttgggggatcctcagccatttgccaccaagaccttctcagcttttccaatagggtggccattggtgtgacatttctttaggagagccagatagcatgagcatccagtcctgttgttctcaacctggctgcacattagactcacatgagatctttgaagaaatactgatgcttgggacctcagcccagaggtacctgataagatcaggtcagggagggagaagagatgtgtgtttttgtttttgttttttggaagatgctccaagtaattctaatgtacaactagaatgaggagcctagttcactggtggtcaatctttaatttttaacatttgattcaaaccaaaccatacacagacgaataaatatagaacacctaagagcagagctaaaggcagactgggaatggggaggggattagtgctccctcttttctccacccacctcctcaacctggacacacatccctggaagctaagagctccacaaagcacagtgcaatcctctgaccagttctaccccttaaagatgaagggccaagggcccagagagcttgcatgtcatgctcaatgtcacccagtgagattgggttagaggcaggctgatgagacgaacctctgcaatctctagagtcacagtgcagtccatctggtttcagggggtcaaagctgggtttgtagtgaccactcgccccggctctgccaaatcctaagctagcaactaattcacctcaccactggtaatgtgctgtgctcagcgaaggatggctgtgcctggaaagccatcaggaaggcacctcattcacatcatttttttcttgctaattgagagtgaagccttcatattccaagaaattgagactacaaaagaaattcctccaaaaacagaatttgcaatctttgtatatatacattccactagtgacagtcatctggtaaccctcatttggcaaaactgaggaatctttccatggcctaagccagaccctgaaatagttcctggatcgaatcctacacaaggcagccatccaggtcactgtagggtaaggggagggggctggaggccttcagagcaactgacgtcccccctggcactcacacccttgctgtgcctgggatctgcactactggctggagggtgtaggctgaggaagaccccggttctcactctctagggggtttgctagttataaagaccaggaacctcagcattctctgggccctgcctcgtggcatcatcttctttcccattcaaaggaggcccatttgagttccagcaggcaccaaagtcagatagctaggtgtacaaaaccactaggctagaagtataagtctttattgttggttctgtgtgcacttgggccagttacttccctgttctggggcttagttttctctgtagaacacgagtggatggacctgagcagttgtttccaggcttatcatacataagaaccaccagaggtgcatgttcagaaggcggcttcgtaggcaccattctctctccaccctgagattctggtctggcaggaagggctggggtgtgtaaatttaaatgttaatatgcagcctgggtgactttgatgcaggtggtccatggtcacactttgacatccactgaactagctgtcttggctttgaagttccatgagttcaggctttcagtctgtgtctgtctggccttggaaactgagttgctttgtagagtggagtcaaaaggatgaaatgtaccatttccaggaccggactagtgacaggaaattccttgctttgggacaagttcttctaatttaatgatattcatccatcataaacatgtgaactttaatgcccgcacatttatggtcctttcttcagaggttaaaaaagaacttcttccaaaactacttttaaaaacttattttgatggaggtacaacacacatatatacatgcgtcaagactgacatagactggtgaagttccacagcagggagaaacaactagtaaatgtgttcctttattcccaaagctaatgattataaacgctttgattatagtaatttgtaaatgagaatgttgatacaccacgcatatattgactttcaacgggatatcagaaaatcaagaactcttctgagttaacctgttcacgtgcttggcacatttctgaccagagaactaggtcttaattgataaacagaagtagatctatggtttttccttttagcctttcctctaggccatggactgtagctggaattcaagcaatctatcaatcaacagatatgttagtagacagtttttagccttaacaagctctacatgtttcaaaatgaaaataaagggaccaagtgtcaagactgaggtcctatgtcccatggtggcattaggagaggatgtgtgatacatcaaaggtctctatgtgcaggtcttaactttttttttaaaaccacattaggtaatacatgttctcattggacaaagattagatcgtgtcgtgttatgtaaagtctatatatgggtagttgataacccaagggcaggtaaagctgcctccctgttttgctagagaatacctcagctgggggcctgaggtgtgggatgcatcagcttcgggccttcctccttggagagtgtccttgtcttcaaacttggagaagaaggagggcttgtttacctcgttctcctttgctaactcagggtctcctgcctttgccatacagacctcggggctgcggtctgacaactgccttgtatttttttaacctgaattacccttgagactgcactctgagttggatggaaatagacccaatgtgttctctggcaagaggctaggatggaagtggtttccttcaggcagaggcaccatctggattcttccaggccctctactcttagaaggattaacacttttcagtttgtaatttaaaactttttgtttcttttttgaaaaatgttctgacccaagcactcccattctgtactctttttttcactgcattctaaaggcattttaaaagatgtaatgaaatcgtttccaatgaaaccataacaaaatcaagtgacggacaagtccaggaatgaagaacaagccacaggacttagaatgcttctctttctgctctgtgttaagaagtgagcgaccatgtggatggctttggggtcagatagatgtggactcacatgaggtgtctatcacttcatagctttgtgaacttggacaagttttatgaagtccctgagatggtatgttagggactgtgagacaaaaacatcatacctacttcctaaagtctctgaggattaagactgtaaaggaagcactgtgttgagcacacactacgtgcttagtaaatataatttcttttctctcaaaccacaggtacatctgtgatttgcttcactcatcccaaagcaacggctgttaactgtagtacaggcaagaatggaagccttttgttttttaatgaatcatagttgtgattcccatgaagcaactagatcagccaacttgctgtacagacttaatatgcgatacttttattacaatgcatttggttacttgaaaatgtgtctgccttccccactcccctgggcatggaagggatatttcttgatttcaactttatatccttcgtgcatctattaacttagttctcagcatatatgggaggtgcttaataaatatttacagaattgaaccaaagacttttaactgtttctaaaaaatcaaagctctatcaaaagtgttaagatttcctactgccgaggttattaacaacagaagtgctctggactttcaggacaattccaaaaaacactgtaagggaaggctctgaggggttaaatagtgttagcagtttgtagattaaaattgtgtagcatcccaacgttactattttgcagggactgaggccaacttcatgaaaatacctgtcattgtgaagaaatcagttacattgacctgttcagaagctttagcttatttatctgtaaaatgagttaattttaccggtcaattcacctcgatgcaatgtgatttaattcaatgcaaatcaattcacctcacatgctttcttggtcctttgcctgaaaagtgaaattctatgtcttcagcttatatttactcctccagacagaggcaagagcgcaagctctctcctttgtgggtcctctcctttgggctccttcagagttttgctcatacctctatccctcatctgtttactcgtctgccttcttgttgcttaaaaattagtccagagtttttactctatcatctcaagccctaacccacctttccaaccctctctctgttcattcactttaagatcttagctaaacagaagtacttcctgttactgcaaaacaattcgtacatttaattcatttgttcattcattcatcatccgatttcattaataatcatcctatcttctacatgagttagcaactgatagtgcagacattccagcatggtaacatgtgactgaagctggtggtgttcctctcctcaagggagctggagtggggtcatgaactcctcagtttgcattaaacatgtttcatcatcttcttcattgtctgatttgacctctaaccaactttctttttctatagaacagatcaaactaagaagattaagttatatgatgtataaatcacctggcatgtgacagacacaaaagcaatatcaatgtccttctctacctcaaccactaatttagttagacccagagccaggataacaaaatggtctcaatgtcaatttagggctctttcttttctattcctgctgtccatctttcagtgaaagaccactcttggtcaatgaccatggcaccagacatcaacaacttcagaattaatctgtgatgggaatcgcaaggttgggaaatgcactgaattgggaagcacttacctcctacatagagcggggagtcaaaattcagtgtggactgctttgacaaattggtgatgattttggggctccctccatccacagagagggagagactctgatccagggcaagtagttccactatgtggaaatttccatcattgatcgtctccacgctacaaaggaaaagcaacttagctgatccttccattttttttttaaagaaaagagattacaatgcaaactccaaaagcactccttgggaaaagatactcctatctaacattaattaaggtaaagaccagtagttgatttaaaaattaaaaaatattttcaaggaggggctggccccatggctgagtggttaagttcgcgcgctccgctgcaggcggcccagtgtttcgttggttcgaatcctgggcgcggacatggcactgctcgtcagaccacgctgaggcagcgtcccacatgccacaactagaagaacccacaacgaagaatacacaactatgtaccggggggctttggggagaaaaaggaaaaagtaaaatcttaaaaaaaaaaaaaatattttcaaggagatacaatcaatttctacttcttaggaagggatagaaaataagcttgttttcccattgggagaagtggaaatgagtacattttatcattatccagtcataggctcccaatatgtagaaattacaaaggataatttatgcatttgcttttaaattctactaaagttccatttactctgatagtgttactccaaattgtattcaaaagacaaggaacctatatctgtgccaaatatactccagagacattggccattggttctgctttcttaaatacattacattaagacttatcagaattaaacatacacacaaatataggaagaaccaacttgggaggatctttgtactttttgaaatttgttaattggtaatacacttttgcttactttgcatttttcagagggatgcccatcaaatgatataactgtgaagagtctatgctcagtgaggaggtaggaataaaagattaaatgaaatgcttaacatagtcatagataggcagtccagtgatgacaatggtccttcagtttctcttctataactttaaagggccagatctaacaattattactgccatcttctaaaaaagttgagaaggcttacggaaattcatacaagggacaaaaacaaaatcattaagaaactgaggtaaatggaaaatgaagatagaaaaataagataaatatgatagaggtgggtgcaattagtaagtgctatacggttttaaagggtggttgtaaaaataacatgaatgttacagcaggcaacaatgaaaacaggaccaatgaaacaggaccgcagaagaaaacaggatcaatacacagtgtggggtcaggaatacacttaccttttactacagaggaaaatatgacacaatggaagttggggccaaaagttaatagtgaatattaaagaaccaatatactaggattttgaccgaaaagatttttaaaaaggctcaaaaatggaaatacaggagcatatgatagagagatggtgaatacctaatattcctaattgcttaaatttccaggtgctgatacttaaatttgcaaatagctcaagcctggaaaattacagagaaatatattgacattcctgcatagttctcatcacagaagtctaatcatatcctattgtttgctgacatagaataagaaggtttgtgatttgacaacagtataaaccattctgcagaactgtgaaagcatttgaagttcttttagcttaagtggttagaagagtgtacgtgtgtagggatctgtgataaccaatctcagatatcatcttttaaaaaataaatagtagatataccaatcagtatttctgccttctacacatttaattatcccaacacttgatatcattaaaatcaacagaggaaacaatatacaaggaaataactttcgaaaaaaagttgcataccaactgttagtggtcttaaatatgactctctttctaaggaggtatgctgggtagtaatatcaaatagttaatcatacagattttggagtcagataaacctggatttgaatcctggtcttgcatttattaaatgcttgccttagataagttacataattgctaataagtttgagtcttttcttcagcaaatgctaataaatatttctccctcctatggttaattcaaggtctatatgaagtgatcttctttgaatgcagagcaaaacatctagcatgtagaaagtgcaaagttgagtgttacatattagtatcaccagtaccaccgtcatataaataatcatcatataaataatccagtactatttcagaatcttcttcaagaagaaattagtccagctttatttttcatattaactgaaagataatgctgaagtctggcagaaatataataacttttcagggggcatatcttgttcaagtaactagaagttttaagtaaaacattaaaataaagatatacatagaatagtggccaattactttttcctttgtgatcatatacaactctttaagtagttttatatgcatgctctatgaatactgaccttaattaagtcataaatatcaataatgggccccctttttttcctttacagttgcaaagaaaagacccgtatgtactgggcaatgggttcttggtcacacatcggtcttagacaatctatccaggtatgtcatcgtggatgatggcgtttgatggagtacaattgaataagctactttaaagcagaaaccatgtattatttatttctttattccttaatgtatccagcagagtgtctggtaaacagtagatgctcaataaatatatattaaataaataaaatataaggtagatgtattaagaatagcatatatagtttttttactaatactaaccggattacaattatagatagtcaaaagactttatgcatatttagggcagtacctctaaagatgcattttatcaaaaaatctgggggccagccccatggcctggtggttaagttaggcacgctccctttcagcagcctgggtttggttcccagacatggacctacaccacttggcagtggccatgttgaggctgcgactcacatatgaaacaggggaagaaaagcatggatgttagctcagggtgcatcttcctcaaacaaaaagaggaagattagcaacagatgttaactcagggaaaatcttcctcagcaaaaaaagaaagttcagatttgtcagtggccatatcctgagtgttaatgctgggagataaatcctgttcagcttgtcctagctctcattagatatgcgacttcagatgatacgtttctgctttattttcctcatcagggaaatgcagataataagaccaaagaattatatagcacatactatggaccaggtactgtttgaagaactttacatgaattaactcacttaagactcacaacaaccctaagaactgggcacttagagtactccaggtggcacagccagtggctaaacagatttgaagccaggttgctggttccagagtacatgctcttaatgatcatgcatcacttttacaatcaacagtctgaagagtacctagtattgtacaaatggcatgtgttctcaccactaacaacgctttaatagatgatttctctcccaaacagcccaggaatacagttctatggaaaacaaccttttatgatggtttcacaacttggttcatttactaaaaatcattaaattgtaaaaaaatctgtaattataaggagagtttgaaggttatgagagtgcatataatgtataaagatttgaaacttgggtttagattctattttcccaattataagtgcaattcagactgaccagatttttgttctctcaaaagttctaaatttctaatctgatcattctagaacttgataagagttaccactgagcttaattcaatttatattttcctggaattaagtgaggactcaccctgaccttttaacaaataagtgttgtaaaatttatatacatatatatatatatatatatatatacacacacacatacatatatatatgtattaggatacttcccagtttattctgaggccagcattactttaataccaaaacctaacaaacacattataagaaaataaaacaatgtattgtgcaataaacaaagatggaaaaattctaaacaaaatattagcaaagtaaatacaatgtataaaagggataatccattataaccaagtgggatttatcccaggaatacaagatttgtttaacattcaaaaatcaatattactcgccatattaacaaactgcaattttaaagtcaataatattttaatttaaaaattaatatcttttagattctttgttgtttaagatgatattgtgtgtacggggcctgaagagaatatgtgagagctaagagtattctaaattggtgtttcatgctgtcttctaaagcatgagaaaaactgggggatgtctagcaatcctttgtctgtaagaccttttaaaatagaaacagtgattgacagccccgttgtcacatgataaaactgagccatcatcagttttatagtctatcacagtcatctcctacctatccacttgcatcgagtaacatccttttggttctgctaagtattggtaaactctctttcactgccccctggggaactatatatacatatatatgatgactcacgaaagtcacaagtgaaccacttaacagtgagcctttccactgggaacagaaattgtatttctgacattattatgtaatttagctttacactcatctattatctgagattttgttttcttgaatttccaaatggatatatgaaaacaaaggagttactcaactgtcctgtggtttgctacagaaaaagagtttaaaaactcagggcttaaaaggagagggctgtaaattgtctctgattttctttacttacgcagggcacactaatgacatttttctattctatctcaaccataaatcttaaggtatttcagtagtttagtaaagataagtagttctctttgcttatgtgagcacctgctttttgccttaaaaatttaaagaatctgtacctatattcagagcaacggaataggaatgagaaatcagacaaatgcaactggtcatctcattttgatatcttggggctaaattcatctgtgaagtggggatggtaataaaaaatttccctgccaacctctgtaagtctaaaggaatgggaagccaaatgggattaaaggtatttacgtatatgtgtaagagttttcagaagaatgttttataaaacaattagtttatcaagtaaagttatatagctttttatttttaaacaattcttttttttttttgaggaagattagccccgagctaacttctgctgccaatcctcctctttttactgaggaagaatggccctgagctaatgtccgtgcccatcttcctatattttttgtgggacgcctgccacagcatggcttgacaaacactgcataggtccacacccgggatctgaacctgtgaaccccgggccactgaagtggaacatatgaacttaactgctgcaccaccaggtatatttttatcagtacttttgaagcaaattatctaatttaagtaaaaatgcattaaaatagacaggagattctacatttggacatactgtaagagtcacatgtaagacaataacatttgcacttgggtattcttcagtatctggatatccgagcatgaagagaatccatagtccagcattatcaataactgtgagcctatgctgtgcctatcactattccaggtactctacaccattacttccaactctcccaaccacatgtgaaaaaacagatacagttacagttactcagatgaggaaatgggagcacaaagaggtgatggaacttgctctaggctatgaagccagcaaatagtggtggctccccacgggctgagtgttcatcttggagatgagcagactatatagattctgtctactggctgtccctccaatgagactaaattctttttattttgacataagcctgtaagttgcctaacccagaggctgtgtagccatccaaacctgacagtcggcagagaaagtctcctgaagttgtccaggtcccgtaaatgccgaaactgattaatgcacggtccagtcctgtacctttgtagggtgttcatctgatttcctaatttttaaataataggtgactacgtttgcaaagaagctatatgatttggaaaatgacattaatttgaatctaaagaaagaagcatacaatttttattaataactaaaaaaacagtttctgcctctctagatgaaaagaaagtcactttgaagggcaatcaattatcagcctacctgaggaaaaaatgtgttactccatctctgtctgagggactactgacgagctttaagtttaactgtcgtcattcattcattcatggcaccattactaagttcctctttacgctattctctaagcattatgaaaatgacgcatgtgtgcaatattctacactcatccacatgttaggcagcttacgtcatctctgtggttgctgattagatcccttagacagcagggtgcaggcaagtgcttaacaactgactctctgaagacagacggtctggattcatagcatgtgctgcttactgtgatggaaatactcctaacatggctggaaatactcccaacaaggctgacatcaagcatgatgacatggaacttggatatgagaagagacacacaccatcagctctcagagcacagctcaaatatattccttttacacaaatggttctcggttggtgtccctgtacctgagcatcacctgggaacttgtagaaatgagaattttggggctcaccccagatatgaatcacaaactagaggttaaacccagtaatctgtacttttaacacatgtttcgggtgattctgatgtatgctattagaaaacaactgttgtatgtctggccctggtagcaggatgcctgtctataaggaaccatgatgttctgtcagatgtaagaaagaaaatgagaaaacctacacaccacttcagttctactggaaaaggaataattactacatcttcggttttcttaaacacacttaagctatgctagctactctctccagacataattccatgaaataattgttctcatttccatccattccagatacaaattgacatctgaaatcaaatgttttaaaccaaaattatacaatagaaatagtaacaatgtatgattatttttccctaatttaacagatttcactttactaaaataaacaaaatctgttcccatcaatcttgaaaattaaccaagaaactgaaaagatgcacctcatgaacaaaattattcccctatgccatgctccgatagcacattaaataatgcatgatttggaaagcaaagttttaccaaagtaaacctcatataacataaaagcatgcaattaaactgaacttaaattttcttcccaaagtttgtaagaggtaagaatgtgtaaaactaccccttgtaaaacattagtgtgctgtacttttaaagaagttatgtaaagtagaaacacaccaagatttgaaaacttaattcaaccaaacaaaatatttactaagcaacttatgggaaagctgatggccacagtgttattgatggattttgctataatgatgggaagtagcacctttcaccagagttcacattctaataaggcctgagtaaggtcagaggcacttagataaatgccagaaaattagtaggagcagaattcagacttggaacaaatttcaagttgaaggtgaaggaaagaaaaaggtcaagagtaactccgctacacttattatgtccaaaaagatggggatgcgtctcaatgaaattaggaatgtgataggaacacagctttgggtgaaacaaaaaactgagttttggacattctgaatttgtgatcctaatagctgtcatagtttactatttggtacacattgttttaaatatcttacacatataaaatcataaaattcttaccacaatcccacaaagacagagctatgatttattatgcccatttaccacgtgaggcccagagagcttacgcaatttgtccaagacacatagttaacagatggcagagctgggacttgaatcaaggaagactgtttggagcacctgctcttttctattacgtcaattttatttttgaatggtaatgacattcaaatgagtcaaaaatcaaaatgatataaaatggtattcatacacaaggtgtgctcccacctcacttgctgctctctatccctggtattttcttcatgaaaatacatggaaatacaaatacatatattcatttacccatctctcccttactttttttccttattattaattttttttgtgtgcagggaaagattcgccctaagctaacatctgttgccaatcttcctcttttttttttccctcctcaaagccccagtgcatatttgcacatcctagttgtaagtccttctagttcttctatgtgggatgccaccacagcatggcaactgacaagacaggtggtgtggttctgcaaccggggaaatgaacccgggatcctgaagtggtaagagaaatgaactttaaccacttggccatcacggctgcctcactttctttttgcttttgaactgagcaatatactttggacatctttcaatatcatacatagagaactttctcattccctccctctctcccttccttttcctttttttttttttgttttggcaggggaagatttgctctacgctaacatctgtttccaattttcctcctttgttcttcctttccctcctccaaagccccagtacatagttgtgtatagttgtaagttcttctggttcttctatgtgagccactgccatggcattgctacagacagagaagcactgtggttctgagcctgggaaccgaaccctggccaccaaagtggagcacaccaaactttaactgctaggccattagggctggctcccttccttttcctttttaaccacacattccattgtgtggatgcactgtagtttatttagatagaaacttgggttgtttcctaacttttgttttttacagccaatgccacagtgaattactttgtgcacacatcatttctatgtcttcaggtatatctgtaggataaatgccaagaagtgggataaatatttccaaattgccctccgttgaccttgtaaacaagccatacttctagtgttaatatgaggattgagggtacactttcaactcctctgctacactccagaaacagatatcagaaagattttcctatattgctagacgagagatgagaatgaagacaatgtgagtgaagagtgagaacagagctgagtgtagaattaaatcttcatagtgaccttatgaggtaggtgctatattattatttacggatatggattctgagacactgaaagattaactactttgcgtgagtttatatactagtaattagccaagcctaaatctgaacacacacatagctactatgattattacttgtcaaacactagatttttgtagcgtgttgaaataatgttctcagtggtctctatttcacaaaagcatttttttctattccaaactggaatactaatacattcatatattaaatatattttttgtatacgtatattggatccatatcaatcaatcaatgtatctgtcatctctctatctgaattctagctaattgttacttattttctttcacttaaaaataatgtaataacttttcttgattgttgtgccatcaactagcaacaagaaataaatgaaagttatgctttccctggacctcacgttatatgtctccattaggtgatctgcaagcagaaacgggaatttctggctcataacagaaagtgtgcaattggatattactttttataaatgtcacagggtatgttctattgttatttaggcaaaaatggtaatgaacataaatcccaaataagctctttatggtaaatcctcacttggatataatcacttggatttctacaacttatctggaaatattttaaatatattttagacgaattctagctttaataagccaacctcaagaatctttagtatagtttctgagaattccatgatgtttcattgcataaaataaaaaaaccaaaaacaaaaatggaccacaaaatcaatattctgaaatctttttatgggctgaaacaaattgaagctatataatttaaggcctagcaatatctaaaatgttggcactaattcatcatcatttggcgatgaaataactactgtattccacttggaaaccaataattatgtgttgttgccatgctctaaatagtcccaagtgggttagctcactaccattcacggctataattagcattcagttttccagaactgtcatgaaaggtcaaatgaaatgtgaaggcttttgaagcacattgatatatatatatatatgtatgcatataaataagatcaataatatagaggccagtgtctccactctatgtctcaatctatgcccataaacttgttgccaagggagtttgcctacagatgcattttgttcaccacatattgtgttttttaaaaatgtgaattgatatttaatgaagggaaaactctatacttaaaaaagccagatttctgcctttccttgaaaaatcaagagttctggcaaaacctgggcccacattttcacatggagtttctccgggagaactgagtaaatgtggactagccctgtttcaacacagatttgcttttagttcactccagtcaaaaccattcctattatatcaccaatatgaaagctatttgtaatagaagaatacttctctgaaaagttcggtcttctaaagagtaaaaggatgagagcatatccttttcttgcaattggactgcttagttcatttaagatacctgcctggagaaactgtatgattttgtgaccctgctcaaaatggtggcagttatttctacatgtgaagaaattaagtgggtaacttatctgcaggatggatagaaaattggtgttgagacccaagagaggagctctgaaggtgagtcttatgcaaaaagcacacttctggcaaaatgtatgccccaggagtaccatccttttcacatcttcaatatgtcatcagtatcattatattattagataactttcaaaatgaatgataagatgaactatcacatatcgtatgcatccattggcttattacgtgtaagctccccaaaggcaggggctgtgttcttgaaagcttagaagagtgtctggttcacagtaggtgctcaataaacaagtgtgtgaatggtaactttaaattattcactgtgctgggaatcctgcagtggtttctctagagctactccccacccatcttcaccttgctctgagccctgggaggctctggtgtgagctacattaccaggctcagtggattccttgttttctgacatctgacttggccaaagggaaacatgggcaggagatcattgggaggaaggagagtggggtcgagatttaaaaccctggttccctccctgagggctgactgcatccgtccaccgaaggtcacagctccactcaggcagtcctctccacgattccttttctgagcatggatttccataactgctgcctcccctcaccctttcaagcacatgggtagtaagagtgtcccttattactagccccaggttactgtactatccctagcaatatttgtaaacagtccccttataaatctctccccaaattatccaacttgagcatgccatctgttcctgccaggcctctaactaattcacttatcataaagctcgctgcagcaaaattattccctcccttccctgttacaaaataatagaggagaaacagttcttcattgaacaattgttttcacctttaccagtaactgagagatcttcacctgtaaatggcagaagccgggtgagagccggtgtcgtagctggcacgaacacgtccccggtagagctctacggcaatatggtctttgtcacccttatacagcaggattccactgtcttcatctgtggcaatctagtaggaagtaagcttgacattagtaggacgtatgttatccaaacgtatttcatcaagaagaaacttgatcgcttagtgaagagtttttgctatggtttattttttccttatggctatgagaaaataataatccatgctgaaacaattacttgaaaggtgacctgttcctaaattactttgttgcaaataaattcagaaagaactttaaaaagaacaataacaaatacacgaacaccttaagtgtggttagaactttctttgctggagatttttatttacctgctctttttgctgctgttatgggttttatttatggcatatgtgaaatgtgacttcattgagcaagaacgtttttcatattccatatgaaaaaacaaatcatttatagctatggcatgaacagggggaaatctctgtttttcatcctgctttctggcctttcccggcttttgaggaccagttcagtaaaacttaggacttaagcctgaacaccacggggtacttctcatgacaatctggtgtggccaatgctgggaggtagggagacatgctttttaaaggaggcctgcctgccttccagagtctcattcctcatgacttctaaagaacctcctgcctcaggatccctcactggagtgtcagagtaaaccaagcaagaaggagtgggctctagaggaaattggctaaagtcatttgaactcaaaacatactaaaatattttgctactcagataaaacaaacatgcagccccaatttgccccacgtaaagcaccttaaatttattacccctaatctagtctaactccttccacaggggtctgaatgccttgctcaaagggacattgtgactaggtggaaagacttacagtagtccccctttatccacccttttacttcctgctgtttcagttacctgtggtcaacctcgatccacaaacattgaatgaaaaattccagaaataaacaattcatcagatttaaagtgcttgctattctgagtagtgtgacagaatcttgcgctggcccgctccatcttgcacagaatgtgagccatccctttgtctactgtatccaggctgcatgtgctacctgtctgttagttacgtagtagctgtctcggtgaccagactgactgtcgtggtattgcagtgcttgtgttcaagtcacccttattttactaaataatagctccaaagcgcaagagtagtggtgctggtaatttggatatgcaaagagaagccataaagttctccctctaagtgaaaaggtgaaagttctcaacttaatgaggaaagcaaaaaaatcatacgctgaggtcgctaagatctacagtaacatcttatcgtacattattatacttgttctattttattattagttactgttaatctcttactgtgtctaactcataaattaaactttatcatacgtatgtgtgtagaggaaaaaacatagtatatacagggtttggtgctgttcgtggtttcaggtgtccactgggggtcttgtaacgtaacccctgtggataagggaggatattgtccagtaaaatttgagtttgttaatttcatgtccgttctgaaaggctctgggtgaagagctaaaggcactgagtgaatatctgccaagccgtgttctgtctcccctgcgctcttctcagctgcaggtttcctaagaaaagccttcctcctgtgcagagcctgaactgcagagacataaacataaatgaatcaaatgcctttacccgagcacaaaacaaagggatatattctgttgctgtgtgttttgtttcatacaatcaagtagtcaataaaaataccggggtcccatttagtttcggaaaatataaatgttggagagaagaatgacaaacttttcccacaagcagcattttctgtctgtgctgtgctgtctatttaagaaataatatcacacaaactaccacggttgtttatgctttgaaggtgaattggcttaagaagagatcagctcttgctggtgggggaaatcttacctgcagagtgatgttcgtttgaggccgaaccttggccgaaggaatttgaagataagactctttgtttacaaaattcacactgaccaatttttcacacttctctccctggtagccaggcaaacactggcatattggctcatttatcctgatgatgcactgagctccattctgacaatcaaaattatcacaggggctggtacgagggaggaccatgggtggagaaaattcacagaacaagccactaaagagtaaagagaaaaaatacgctaattagattttacttaattgccaatgtgaattgagttctgtaagccctaattctacaaatgtgtatttctacttttacctgtatccttcagggcagatgcacgtatagccgtttactgcatcagtgcagtgggctccgtttttacacttgttatcttgacagtcatcaaaatcaatgtcgcagtgctcgccaatatatcctggtgtgcagtcacatctgtttgaaaaagcaggtaaaaagtttcaaatccaactgagccaaaataagtaaaacagttgcattccatctagacaaaaatggcacctcctttaaaaagctgatttagaacaggttcatagagcctaaaattaatagatacctggaaaatagtgctgatctgcaaagtagtccatggtttctcaccgtgatctatcagaggaatggggattttacctctctgacgatagtgagaatccacgattcaagtaagaatagaatagttgcaccagggttcatcccttcctccttcctttccactctccctccctccctcttgccccactttatttgcctacagtgtcctctattttcggctctaattgatttgagctgctgagatgacaaaagtgctttgttgtaaaatttactaagaatattaagcatctttttaagaacaattaacattttaattttctaatagagactggatacattggaataaaatataactttatgaaaagcaaatattttaacactgaatgagtccctaattcatcacgaatccagataagcatagcactgatggtgaagaaccaaggataataatacagctgatgttctctgagtactttctctgttccccgttctaaccacttcgcatatacgggttcactgaatcctctccatagccctgtgagatcagtgataccattactctactctataggtgaggaaactaagggacaaatgggctaagtaccttacttgaggacattcaacttgtaagtgtcacagccaggagctgaccccagcagtcttccaagagagcctggatttctaaccaccgcactatgctgttagataattcattcctcagggctccctttaaaatctgtccttctctagtgctgactgctagaatctttactatgtcaccaaggacccaggactttagagctgcctgaggaaagccatagagcatgtgcagtgttttcaaactatactttgtggagctatgggggaccatggaacccctaaagatatggctgtggagggggagggggcttctggaagcttccctctgctctcccctctcccccaacactctcttattgtcacttattagttttacacattgggcttccatgagcgtttctgttttgggtttaaaaaagggttcactgactttaaaaaacaaataaaccaggaaactttgttctacccctacagaatttggactgtgcagtgagacagaactgcatttgtatcctggagtcatcctttaagtgtatgtaatcttcactgagtaatttaatctctgtaaatgttcatttcttcatctgtaacatgtacacaataattcccatctcacaggtttgttaaaagattaagtaaaacactatctgtaaaacaattagtatagtgtttgatatctaaagtatgatcaacaaacggtaggcttttaaaaataattctatgtaagtctttataattctataaaagtctttatggtttagtctatactaattatccacttttctatttccaagccattaagatttaagtgaatgaggataattaaaaacacccaagtgaatgtggacattaccgaatgccaagggttttgtctgaaaatgcaaaatcaggatttgagagttagtggagagctgatgaattaaaataaatgggagtatatataccctctcagggtaacacacagactttcagctctgcatgtatgaatttagaaataaattgaactcactgcataaacacgattgctctagagccagtggttttaatgctaaatcataacaaagcaaagcaaacagcaagtctgaagttaaatggatcctaagtggccacagacattctcaattggatggacaggacctgagaaaagagcttccatcagtgttaatgtgagcagagccgctgaagtgccatgcattaaaagagagaagaaacgctttgaaacactctgaattatttatctgagaaaagaaatcaaagtaaaagataagagaaccacacattcaccacagtgactgtctaagagctattttatattctcttctctacaaataccatttttcaagcccattagaacttaaagtcatttatgaccaacatttttgtctttcttttgctcctcagactgggtttcaaaacaggcagaaaacatttaattaagaattccttaagctttgtattagcaataaaacctatcacatttcctcaactctattatctgacaaggagagaggaagaaagcaaagaatataaaatacactgtttagaagcccagaagttgactaagtaagatgcaggcttgaaaatactgcttatggcacatcatggtctaaaaatatctcaaagcaatttaggagatttacgaggtgtataataaagcagggaaaataacaccagctctgttagcttagtcataaggaaatgaagttgaaataacagtacaacttgtccaaacatttgtcagtagagattctttagcaacttcacatagttttggtttttaagtcccttttctttttgcaactctctttcccacaatgtgcaattgtttataaaatgggagcaacagcataaactatgacttaacctgttttctgctgaattacatacagctgtaaaacaagctcccaaactactgctgaaaaccatgggttcccaaatcagctaacccatactccagcaagatgtacttttaagagtgtgcaatctaattgatagtaacagaagatattgaattaaggattagtctttttgaagaagaattcccttattttttaatggtttccattaagtcttactaatacttttataattacaaagcacaaaaccctgtgaaacctgcatagcagatgagcagttctggaaaaccactggatttactgactaatttctctgagaaatgataatagttgctatggaagtgatgcacttgcaatttgccaaattccattgtgggcagatcaaagacatcaggagttgaaataatttatgtacagtattaggatgaacaaaatgcaacgcagaattttatataaaagaaagatttcaataggagttttgttttttgcgtagggatgtaaatgaaaatgtaatgaaaaatagaatcaaaagcattcttttctttttcaataaggcatcaaatggaagcagcaggtgctataactttgtatattctaaattgatgaattttaaacccaaatgaatcaaaagaacattctctaaataaaacttgagaataagtgctttgttcagattgatctttgaaaggcaacgacagtctggtgatactgaccccagctcccactcaacttagaatgtctgatgatctgttgacaagtgtcaatatgtcagagtcccagttcaaatcccatctccccttatgaaaccattcctgacctgagtaactttgaattctctgaatcctatggcaattaagtctgagtcattccaccgaaaagacagagcatgtgaaagtgaataggtataaagcactacaaaaccatagatggtattatcaccatgtgccctggcccatggaggtgctcaataaatattaggtgaaggaagaaataatgctatttgctaattggctgatgtaaacacagctcaactcctgaacccaactgagattcctgagaattcagcttactttctataacaaaccaactataatgttaacaaactataaaacttcttagtggtaacctgtaatagaaaagccaaaaataaaacccagctccagttttgccaatgaataacactgagatcctggacagccacccaaccactctggatcatggttacctcaggtttaaaatgaagaatttgggacaaatgaactctaaaccactgccagctctaagaagagaggttgctgttgatagacccttaaaacgtttcagatttgcggcagaggcatcatttaatttgatgccaaatatatttcaggaagacagctgaggaggaaaaagaagtgattttgaagcttgagatcaactcaagaagcccactgtaaagtgactgtgtgctttatcatcccacacaagacaaatttaaggtgaaaggggcacaactaataattatactgagacaacaggcataaactggtacggtcgcggggcaacctgggacatatggccactcagtcttcctcaccttggacagttaaagtattattgaagaccaaaaaattttcagatacgttaagttaaactctctatttcatcacagacttacattcagataataaagcacctagtagatatgacaaatttatttagcctttaaataaatttaagcaaacacagtcaaaggtaactttatttcatacatgacttcccaggaagagtcatggaacaaaaggaaacactctcttttatttagttcagtgtactaaaaaaagtccatgctgtataagaacgtttataaaaatgcccttgacactagacagaatgtccctttaatcctgagcaaaggtgcgaagccaggtcctgaaaggaaggaggagaagaggtgttcctaaaagaatagccccctcccctgacttggagccccaaggcagcctctgacttacttgaatccctttggggtcaggatgcacttggagtcgtgctggcaggggttcaggtcttgggcacagaagtccagcttctcctcacacaactcacctgttaacacagcaaacagtgttagtccacggagaaggattaacaggcttcccgccagcaggccatgtcacgggcctcagagacaagcgcagctcattagagggaaaacaatcacaagacatgcaagcagaagatccaaaatgctggttttgctgctaaacagtcttatgatttgggacaacacaactattctgatctgtgactaatacgagcccctttagaatatactattggaattaggagaaggaaatcggaatggttttcatttctatttatttattttattttggacttttttttgaggtatagcatatatccaaaggataaacgaatagctaatgaatattcataagctgaacccattcacataactggcatctacatccagaaacaccatttaccagcatcccagaagcctcatcacagggtaactaaccactatcctgacgggaccatagattagttgtgcctgttttccagttagacataaacagaatcattcgggatgtatccctttatgtctggcttattctgctgttttatatttgaaaaaataatcctcaaatcttcctagtctccagtgtcttataagtctagaagaaaaaggctttgtttccctcttatgaattatgaaaacagctcaacagaatactccttagctacatccaccagatagaaagaaaaaagccaaagaagaatcaatctagataaagaacatatgcttttttctgagtatcagctagctcataaaaaataatttttatcaataaacgagagctaagagcataaccatgcagattctagaaagtctatgtcaaactgcatgtctgactatttcttagaaagtctcttcagatacaaataacatggttatatttcattttcagatatattaagccaaatatgatttttagtgagaaaaatttcccaatcattgtgtgagatattaaggtgactagaaagatgtaaaagaaaagagttcttctctccttttctactttgcctttaaattactttttaattattttatatgcagtaaatgaatgaagtgacacatctataggttgctgttcatttccaagaaactattagaacttttatttttccaaagtgtgtggatttaaacagcagtggttaaaaaatcaggaatttgtagtatatccctttgttacaagactgtccttttaaggtaatactttgctaattggtagaaatagttgtttaacaactaaatgcagcatattatttacacttaaagcatctttttccatgatggaaatatataaatgtacgcatctaggcattacattaatttggtgtgtagtaagttaggttttttttcctgtctcttaaagtaagtgattgaattgaaagtttcatatacttcttctataagaaggttttctgtctctaaatcagtgatacaaaagtttttaacaacatatacatgatgagatatttataaatagggtttattttcacagctttccactttcaattagtattactttaagtaacataccttgatggaatttattcattataatctatcagcctatcatgatgaaatcactttcagtcttttaatcagctctatctggttggctagagactgtttacagcagtctatatccaaggcagtttgtaaaaattaaaaatagagagggagcatttgaaatagataataaatgtcattctacgtatctttcactttatgcccaactaagaaattgttttaaaaatgataagaaaggggaaaatgttttagttcttattcactttgatacaattccatctaaccgaatccaatccaattgtctaaactgtacttcataagaatttactacagtcatggtctgcataatgatgtttcggttgatggactgcatgtatgatggcggcaccataagattagtaccatatagcctggatgtgtagtaggctataccatctaggtttgtgtaagtacactctatgatgttcgcacaacgacgaaatcacctaatgatgcatttctcagaacttgtccttgttgtaagtgacacacaactatatatgacgctgtgctagatgctgaggttaaaaggatgaatgtaatggactctgccctcagtcagctcccaagctaccagtagagaaagtccgagctgaagacagaacagagagagaatttcatctctgacagaagaaaatagagttgaccctttattctccaccaggtatttctccataaacttgacgtagaaaggagtgagagaggagatggttttacgaaactgttggctaaacagactgccaaatctgcaatcaacagctttaagactaggcatgccaatctgaacgtgaaaagctagattaatgtcaaatattccgcatcttataaggaatctatcttataagaatagcatagcagcaatattaatgattgctaaagttgcgtaggatatctctttgtgaccattacatagctacacatctgactctggtgagactggttgattacttcaaaaaggatttgtctccctttaagtatcaccaaacattacaatatcaacgaatgttacaaaagcattctctgcatcccattactgcctaactcacttttaaagcccatcttccaccctatacttgtcacctgcttctgttcactattttaatctcaactgcacacctgggctactgatatttcctttagctttaataacattagtaatttctgttgtcaattttctcatccatgatatgtccccttctctaagaaatcttcctggatcttttcaaccatttttagtttacctacaagttttatatgtcatgtttgcttgtacctatcttatggcacttatattatacatatttattgacttgatgaacatttatatagtgcttactaccatgtatcaagacagttctaaacattgtgcaaatatgcacttaatgttcacaacaacctataaagtaaggttgtagggttgcactgtcttagaagcattgggcattagtagtgtttatctcattccctttgtttgattgtaagatcactgagaacaaacacttggcatatttatctttatatccttctaaagtatcaggttgtgacttactaaaataatagttattgaaagaaagaatcatgctttttaaggcaggaattccatgttgttgacctatattcaacttggatttgatttcatgcttttgacatttttctgtttagtttttacttaataattagtcactcatcattaataataacatagcttatactcttccctttaaacattgcttaaaaatttccctttctgaattttaaaataaatgttttcattggactatttctttaacttgttctaattgtattagattctgctgtatttgaaagaagggagcttttaaaatacaagtattttcccacagtaggcagactttggagcttaatatgggaaatgtagcaagccccatagacaaatgcaggatttcacatcttcttctcaaccagtaaaggaaaactggacatctgcaagctgcactggctttccaggaagaaaggaaataaaatgcactaacagtagtgcactcatatgcttttagttactatggaaaaactttctccaaatctcacagtattgagaggacattatgcaacttttccttggtttttatttttggcatacgtgtagtcagaaccagtaccgagtcagtaaaaaaaaatcaagtaaaaatgacggaaaataaggtgagtgaatttgcttttttgatggtccagggcctgagataatatcatcaatggttgcttcccttcctgagatgataaaaatgtggggtgacagaaaggacagatagaaatgttctttattctactacacatagtaccgtaatctgttatcctacgagcaggtcttcatgagtttaacttggcatcaggaaagataagccagcctgccagagtggttaagggcaatgtagttgaatacaggttaaatttcagtgcccatgaacctattatgagacaggggtctagacacaccttgattccgtaatttggctccaaccgacgccactaaatcccaggaaatcctatttatttgctttcagctctagacccttagatgtccccaatgacaaagcaacagcatggaacacaatgatgtctgccatttgtgatttcacttttgatctgatgagcaaattaatttcctcatgcttccagttttcagcctttttgttgatgagaagttaaaggtgtgtatgtgtgtgtatgtaatatgtattggttgtctgtgttttggagaagaagcagagaatgtcaaccagggagcctgctgtttcctcttcaggataacaggggttagggaatgatccactataacttgtgaagaaaagcactgcacgtcctacacagatgtgttttttttaagaaagcgatgatatctagtttgtggatcgcctcttcctcattgtgtctgtcaggttaagtgtgacatagagtgggattgcaaatggacaagctctacagttacactaggatgaccttggagggagcaaggcaagagcgatgccaacttccctaaaagggtttgattcctcaaggcctgctcttgaggagaagatagaattcattactcactgaacatctgcaaacatggcttttctgaagaattttgatgtagtggtaatgtgaccatatatcctgggttgcttaggacagtcctggtttacacttgttgtcccaaggtaattatcaatagtgtccccatgcacccatacagatgatttgggtggtaaacattatgggcacgttgtaggtggagcagtaaaagttggatggtcatagttaatgctctgtttggagtgaagagtgaaccagcataaagagatcctagggagaaactattcttattgggtgagatgacgtgggctgctgagttattgcttggaacggccttctgcagcttattcagtataaaacagtggactgcttgcagagaagtgaactattttattgttctgggtcccaatttttcattggtaaaatgaggctctggaattggaattgaagttgtgcaaggtcaactgtggctctaaaaagtctttaaaaaaaaaggaaaatgattctaaagagatggataatgcagagagcgagtcagcagagggagcatcacacttagctgtacaaaacaacatgactgcgttcagtggtaaaaagaaagtgtcagcacgtgcccagagcccccaaggtaccaatatcgtgaatattcttgcactgaggcagaaacctcaatgcacgttgatggttcttatgggaaacagcacttggagttgcccttgtactcctgcttcattttagatccatgaaccaaattgattttaatgttccttccttcttaaacacaaggggtccttccttttatcttcgtttgtacttcttgtatcttaagttatctttttgtttacatttcttattaccacacttactgagatagttttagaactattctacaaacttcttccatgatacctattgggtgatctgcctatggctttttctaatggttctgatagcaaatcatatttttaacatcatcatgtattttgagtgtcaactatgtatgagaacctctgttaatgctaggagtataatggtgaacaacaacaagaaaaaaatgataccccttttctcatggagcttaggtttgagaggaggaggagaaagatattaatccaaacctttcagaagtaactataaaattgcctgtatgatgaatgctaagcagaaaaatgtcatggtgctctagaagggggactgactgtaagagcagctcttccgaagaagtgagacttggatgtgagggtgaagagggaatgatgagcactggcagaggctctgtgcagtaggtggcaggagaatatgagctctgagtgattgggagtgagcctgggaaagcatggtgccagataaggctacagaggttggcaggggccacgtggtagaaggtctttactcaacgagcaatgggctgccatggaagagttttaagttggaggatggccagatgacatctgggctttgaaaaaaacattctggccccagtggaggatggactgcagaggggcagatacaaatggacatgagagatgacttagctagcactcaagtggtggtagaggagatatggatggccaggagagctgtttaggaagcaaaacagatgggaatttgtgaaggattggatgagggtagggggatagagggggagttgtctgggacttctaggcttctggtatgtgtttttggaactgcctttcagtgacatggggaacaacgaaaagaccaggttttctgggggcaaagatcaagaattttaaatacagcgatgtggtgtttgagtttaattgtgtccctctctctctccaaaaaagatatgttggagtcttccagtatttcatatctcagaatgtgaccttatttgtagatagggtctttatagaggtaataaggtcaatatgaggtcattagagtgggccctaatccaatacagctgatgttcttataagaaagggaaatttggcacagagggaagatgatatgaagagacacagggagaagatgaccatctactggtcaagtagaaagcctaaaatggatcctttcctcatagccctcagaaggaaccaacactgctgacaccaggatttcagactttttatttttgcagggaaagattcaccccgagctaacatcttttgccaatcttcctcttttttttcctcctccccaaagccccagtgcatggttgtatatcgtagctgtagatccttctagttcttctgtgtgagctgccacgacagcatggcaattgatagacaagcagtgtggttccacgaccaggaaactgggccactgattcagtgagagtgcccaactttaaccactaggccattggggctggctctgatttcagacttttaacctccagaactgtgaggcaataaatttctgttacttaagccacctagtttgtgctactttattatagtagcactagcaaaccaatatgggtggtaaattctaaattataagaggtttccagtgggaaataaagctttatatttatcccactatttctcttcttctttttctttttgattcttatgtctatttcctttatttcattccatgtggctgtcctctcctttgcctgaaattttcttttttgtctctgagcttctctaacagagtctgtaataagtgatgcacaaggaaaggaagtggcccatgaccatgacttctgcacttcaagagtcaaggtctgaagggaacacagcagagtggttcaaccctacatttgctaccaggactagaagcctctctgcaaagcactgtgagtcttggttgacttagaccaatcagctttagctctctctccaaggggagttggtgttaacagttagggtccgcagtaccggctgcagtacaacagtaatgaagatactcctccctttggggtgttaaaggtgacaaaagcaagagaatcacaaaccattgtgttttgtagagggggagaaaagtgagtccagtgtcttgtttcatcaactttacaataaatttggagattggcttgaatttgaatgatagctgcaattaataataactaccaatatttctactatcattaatttaaaaaatagtaatcttgaaagtattttattaaattctgtcaaagacatcaaagctcatgagaagtggaggatacctgaggtgaatcatgtcaccaataatgatttacatttctcacacacacactcaaattccttaaacatgctttttcttaaaaaatactggtttaactcatggcattgctgaaaattcttaactgtcttgattctttggcaaatcaataaataatgaagatattatatagtccatgggagttaacattaactatttcctgaaactagaaagaatagtctaaaagaaaattaaccacttaaaatatgattaatttacatgtactctggagtgagaatttcttatttgaccaaaatgcaaagctgctttagttaataattttcataataaaatgttggggggaaatattttgagctagatccagcaaatgattaaaggatgtgcatgacagtctttactctggagaagctataatctggaaaaactagataaataagataacatgctgatttcccagtatcccttaagtttcatttggtgactggaatatggacagcatcctgccctagaaactggctaaatggcttattgttttcatttattattaaaaattatactatccagtcctaaaattcattattatctctaaagagacttcttcccttggtaaagtaatctgtgccattcagacagaagaaagtttgaagagtcactgaatgcatgattcgctgctttctatctgccaagaaatctgggcaacagcgtgtctcacccaggcttttctagtcctcaaagcctgcctaatagaaatgaggttgatcattttgtccctggattaggatttccaaaattttccaactcaaatcattctgtttaaaatattcgtttgttttatattaatagagcaacaagaaagggtagatttgaatgaataagcatctcttttcaatttttccaaaagctgctttgtaaattcaggttgggtatgtctaaaacaaaaacagttttagatgtgggttcatggcattgctgaaacatttaactgttgctagttcttgctaatataaccagattagtttctttttttctctgaggcagaagaaaatctcacagtccattctgagaatcatggatgtatacaggaggtggggagggctctggggctgacactgcagcctgttcttgttcctattcataaattggaccaaattactttttttttttttttaatatgaaaggatcattaatattgataataatggaaagagaacttatgacagcaatctgaataaggagaccagaattcgagtgttaaacttaatcagttatgacattttgaaatatacttgtaacaagggaggaagtccgtttgaattcctgagagaatccccaggacaacgatttttggagggtcaaatgcatcattcttcaaatatttgcattttgagctcttgcttggctcaagaaaaacctgaaaaaaagggtactcatttcaccctacttgaattggtacagcaagggcaggtatcaacaaaagcaatctgttaggtaaaataaatttgatttgacttcttaaaagtacactacttgagggcaagggataaatacctttttcatatattttcacttctccattcccactgcatttactaacaaattgtctggcacaaactagatacttgatggctgttgaaaaatgtgaaatatagcacttatttgattgcttcccaaagaaaaatatgttttgaatgttaatgaaggagctccagatggcataagggacagtgtaagggagcagagaaaatgaggaaaaccggtagcagatttgtgttctgagatcccagcctgaggtccacccatgccggctaggctagatgggtacctgttgactcagatatgtgtacagtctcctctgccaaataatgaccatcccaatgggaagtggagaggatgaactcaccaactgaggaaatgtgagtgaaagcatttaagtggaatgtttgagaaaggttcaaataaatggacctgaatgtttcccttactgaattaaaaaaattccatacacttcctatcaaaaaactgtgcatttcccctttcttcatttatataaagaaaaccatttttctcctctcacagacattgcagtgtagcagggacggctgaaccgcagtagatggtggacacagctgatgggattatagaagtcatcccaggacaggctaattgaattggacctgaaagaaaagtatttctgttttctcctcttttgctgaacaggccagccttatttgttacctactctgctcaaagttataatcccagacatgagagcacattaacacaggcagatgtccagtctccaatctgaatattcagtatccctatcagtggtgatggtaataatcaactttatttccattaagtaaaggattacttatgaacagtgtgtttctgtttcttattttttgaaagagttaactttcactgaagatttattttaaaagttttttttaaagattggccctgagctaacatctgttgccaatctttgttcttttccctttttcttcttcccaaagccccccagtacatagtcagttgtacattctagttgtaggtccttctagttatggcatgtgggatgccgcctcagcatggcctgatgagcggtaccatgtccgcgcccaggatccgaagtggagaaaccccaggccaccgaagtacagcacatgaactcaaccactcggccccggggccagcccctaaagattcattttaataatctgatgctttcttatttgtgttcactgtcctgaaatttgtcctatcaattagaaatacttcagcgaccttcacaatatgatcaataatctatacagatcatgcccacttctctaaacttaattgaatccagttgtcagtatagaaatacaaggaactgatttgaagggctgtgaattcttgaagataggtggccactgataaatgcccttttggtgcaaaaggtgtgcataatggacaacatgcataagcgggacactgccacagagaaacctcatgagataaagttcattataattcagaatagggaggctcaagacaatatgctataaatgtggatattaagatgttatcatcaaggaaaatcattttatgttctcatttttgtcctaaatgatgtgacataaattgctccataatgcctgtttgcaagaagtttgattagtcttcatattcagaaaagagtgcttctctttactcacaaactaggaagtaactctattatgctggtaactttcttgggatatgagaaacgatggctttgtactggtgaaataactgacctaatctgaatttgcaggcaagagtcaaagccaagagtttgcctgctagacgagggtactgttttatgcatttttgtatcactttcgatgcttagcacagtgtcttgcataaagtattttctcaataaatatcttttgaatttttaaaatggaaaaacttacctcaccaaataaataaacaaaagaggaggtgttttttagtacttcctcaccggaacattgaggataaatattgtagtcaattccaacagctactgaaattgcagaaatatttaactccattttcaagataaataaatccaaattagatcgaacaaagcttggttaagctaaactgtttttctgggctcaatgggccctgcctattagctaaagagcaaacaagatctttaaaaggtattctgagattcaaatgcacttaagaaggctttgaaagcttagaagatgaatgcaaaccacacaatatcgttaggttgccaaagtattcctcctagttaaaacagactgcacatatgattgcaactatattgactttgatataaagacgttacacatttcaaggcagaattaataacagaagaagtcactattattaagggattatgaaaatccaaaaatatacacaaaacctaaaaaaatacaaccgaatgcaagagttcttcagcattcaacatctccttatacttcaaaggagagtaagggagaaaatagaaccaaagacttattgttaaataaagtctttccatttgaagtgagtatggaaaataaataacaaaataagaatttaagaaaaagatagtactgaaaaatatggggatcttttctttatcaaaattcccataagatttcttatgccattaggaatgccatcaaatcatctaaaccatgtcactatagtgatgacggttggaattaaatgatgcaaaacttaaacctgtcatacggagcagcccctgatattttttggagtatagacatttaacatattaaagtgtttttctatacattcttccacgtgactctcaaacatctgaggtgagacagatgtcattatcctgtgtcacagaagaaagacaagactgagggaggtcccagagttgataaatattagtgccaggatgagaaacctgaccttttcccattagcgacacaaatttatcagtatcccacatgccctgtgtgatgggaggtagcctagtcaccaggggaattaattaattaattgtgcagtcattgattaggcattttcttttttccatgtgtgaataaaatagattgcttgtctgcacctgaattttgtggctacatgtttacttttcaaatgtacataagggacaattatgtatagcaagctgaagagaaagcagaagaaaaacttatttagcataaaggattagtcccagccattatgggatgtgaaaagattccaagcctggtagatgacagcagataagaagggactggttctagtggaaggtccaaattagggtgcctgccttggggtcagttagacatgggtttgcatttaggccccttcttacaaggtgtgcatccttgggtaagtgctttctcattgttttgtatgagttgttgctcaaatccttaatgttcatacccagagttcttttaaattaacaatacatcaactaattatgcagcttccttttatttaagaaaattaccctcagtgctataaagaaattgaaatttcatttctaattaagttttggattaaaaaaatagaaaatggtttgactcttttaaaaaggaaattcagtcagcagtggattattggaaacaaaagacatcttttacaaacataaccatgaaatttagtcaacacatgaaaccacgtggtgatttaaaacactatcacactgccaagcttgctcctgagagcacatataactatttgacatagtcctgtgacagaataattgccactgtatttctgaggtgggatcagaccttagacatccttgccccagaccgccaattgctttagtacttgtaacaagaaaagatgacatttgaccaaggatcgtattggatgcattaatccacagagaactgtataggctatatttttacattctaaaatatgaaaccattttttttttcatgtttttcagcttaactttacacatagtgagagtaagtgaccaaacacactaaatcacctgaacaatgcaacagaaaaaatgaagtctttagctagaggagatagagagagctgctatataatgtatttcatattagccctataatcccactgccaatccttcccataccactagaactgtcaagacaagcatgcagtgtgctccttttaggatgctgtgcctgcacttgacttctggtaagctgaacagtaaaaatccaacgttattagtagtaattctgaatcttcaagataaaatttcaccaagattccatgatgattccccagacgtgactatcaccctaagtactctaggacttaatttcctgctccctgatgtacttggggaaccatgtggaccatattgatgtcaatgatcagatatggctctttttactctaaaaatactgcctactactcatgatgttccatattatgagtttgacaacgtcctttgataagtcaacctcttgggctttgtaatatttattttataaaatgttttaataaatgtatacatcttccaatatttttcatgtttcaaattactaaagataattagtttaaagttatgagaaaattcctattatttaaaaatttttctatttacaacctgcctactatactaagtgatctatgttgttcattgtaaaaataattcatgtttgtgatatctttaaaaaactaaaagcatacagacaagtagaaaatattagtctttctttttagccaccctttcttcccactcagagtttcttttatagccttctagaaattggtaaagtgcattttagatggttctttcatagtgtttggcatatctatccatataccaaggagctgaatgactgatttgacatactgatttcagatttcagcttttgtcaacatttcttttaccatgtacacacaatgaaatctatgtagctttaaaagaaagagggcaactaaaatgaaaatcataatagacttaaaaggcaactaacctttttccacctcattcagattagcagctggcagcgacaaagacagaagagacaaaagactttttacatggcaatacaacagcagagcacatgaagccagtgagcagcattaacaacagagaagccaagggtgagagcaaactgaagcaaggcttagatttcttacctacagccgggccaaacacacaaacatggagtaaatgaggtaaaaggtaaacgccattatagggagcgagagacctgtgtctaaaccaggtgatttaacaaccagcagctttactttttaagatgtgcacttaatggtttgtgtgtgggcattggagatttggaaaacaaagagataatggtacgaaatggaaaaattaaaatgttctgaatattttgcacaaaatatatgctaagcttttacatgcccaacttgtacgggaattttcatttactgaatttatgcaatcccatgaagcaatattatggtttaaaatgtgatcaattttgtatcatctttgtatgtggtcccctgagaagaaggttaattaagaaacatagtcttgacagagcagatctgggcttctgactctcaggaaacatgcaaaaacacattttttcaattcaacacccaagttcataccagagcttaagaaaaggtgtcaagtttttcaacactgcaggggtaccatgtttacaactttcctttttataggttttaaacttgtgtcatttaaggaattccttgaaaatttaccttcaagaaatgccttgtttttataaaggatataataatgattaaaagaaaaaaagaaaaaaccccacaatctctcaagctaaaattaaaacactagagtagatttttaaattatttgttcagcaattccagagtcctacttgctttatccttagcgtagtgattttaatttggaatgatggtgaattaaactcttccaaaattaatcttgtcggaagaatactggcaatcaacagtcatatgttatacaactaggacagataatggattgaattaggtagaaaataatagctttgctaactcaaatggggagggtaaagcaagggttagataacagaaaaacagtattgacccttaaaatttgtgttgttaataccggcagcaggaaagagcagagagttttgtcctctaatgaatcaataactatttactgtgatattttggttacatgggcttaaataaatttagtaaatttcacagtggtggttcatcttattctgaatatttgtagctgtgttttacagcctgctcatcacaagttgtctgtctgattgctttcagatctccaaatcttcctaattaacatcacacccattctgactcttgacatggatgtcaaatgtgaaaatcttcaccataataacttacaagctctttccatgaagttttatttgcttctactaaagagtttactttctcattgtgtgcctttggggtgcagagtaaaaaaatcttcaaacagaaaagcaacttgtgacttgaatgatttttaaacaatgacaacattattatattccctgagcatagcagggtttctgttcccaaatctcatgctcattaatcagtttccaaacttacatctaaaacaatacagctataatataagaaaattcctccctaactgcagacttggaggaagcaggatatgaaacgctagagtccaatttatactttcctataattaaaggccacttatgtgccactgacttcaaaatctgcagatggttgtttgatattttgtaaatgagctcatttcacatgtggacaaaaagactactgctaatagatgagttacaaatgtgtctggcttagatatctgttctatttccaaattgtgaaactctttgttgcccacaagatccagctcaaagttagagtgttaacatcttcatgctctgtaggctatgaactttctattgagttcagtatttctcttccctttgcctggattaaggcaaactgatatttgcaatagtgatgactagaaagactaaaagaatctcagttcttgtgagaactcgatggctcttgacagatagttgtggcaggttcccacatcatagcttttatagatgtcacattttggctaaaaaatgtttttgctaagctttgagtttttttgatatgtttcagaaaaacagatctgacacagggaaatggggcttcacaacacttctcagagaaagctgcactgaactgaatcacttaggatggagaaaacgtgttaaagaggattgggtgtaggaagggagcttggaaaatgaagggagagaaggtaagacaaagtctcaaaagaaatgggtaaggaataaggtacagcaaatctagagccaaagcaggcagactcctccaaaccaactcagaagagtctaccatcttacacaaattatcataaaaaagacatataagaagttgaatactgcagtgccctcaagcctaggttttcatcactaaggggacagataaactcctggtttctgtgctccaggcaaagagtgctgaaatgcttgggtccaatttgtcttagtcagagtagattggcttaaggaggcctcccaaattaagtgaattcagccctctctataatgactaaaacaatggtggggaaaaaagaactattctatttagattaatctaggtaacagattttagtccaaatgttgggcttcttgtacaagtctaaattagcccatccaataaaacttagattctcatggtagatccaagggctccagaatctgtatgtgtggttaatggcaagtatctgaggtatgacacaagtaacattggtgtgaaagtcaaaactatgtaacacctaaactcttcccagccactttagactgggggcatgttggagacactcgctatcctttattaatgcaaaatatcaaagaacatccaaattctgcccactaaggagtccactgactgtgtatatgtaatagagcaattggggatatagagaaattcaaaattctactgaattgtggcatcaggtgctgccctggaaaaaaaaccccaacatactggaaaagttagcttctggggcattcaaacagatccaaggtgtcaaaacagaaccccatcactttatccagcatttttatatcaagaaaggaatttcatagaatgcaaagtgtgggtattccataaaaccttaaatttctacgctttcccaacaaatctctgggaaagttaattatacagatgtgctttcatcttacgtgtttagagatgttaacctcagtcatttccatagttatttcatcctctgatattttaactgtgtattaaattatatgaaaatcaataaaattaatgaaaaatactcagcaaaaatgtaaatggtaactctgagtgacagtacctacttctccactttttctcataaataaaatatggaacattctccttttctccatcaactttaaaactaagtggtttattaaggaaacaagattgttaccatgaattttcttattcatagtcacaaaaatcaataaaacagatattctgacataacaggcaactcagaaacttgatgatgactttatagcatattagtttatccagggaagaagtttagcagcttgaatagtgttatgagatttattacctcaagatacaaaatgtcagaaaaatggtgctagtctcataagattatccaaagtgctcagtatcttcctaattgcattttattttgaaggacacgagttactagagcaatccgctcactagtgaagaaacaagaatggacataagtaatctgaaatgcttaattatgttttcactatgtaaagaaatggccccttttcacgtacgtattggtgcattggtttgcatgggaaatatgctttgcgtgaaaatgccattcaattgtggggctaaaagcttcagtttgacagcttcttttttgctggacagcatgactttatgatagatgcctacgttctaactgagcttgctgggtcttttatttggttggctgaaaccatctttaagtccatctgttattcacattatatctgatttccgaaacacctaccagttagtgaataatacagtggtttactaaacatacattggcagcttagtgccaatgatgctctcaaacagacacagagatcgatggcgcagcatttcctattcttcttacctgtgtactcaggtgggcaaaggcaggtgtagttattaattccatcgacgcacgtagaattattttcacagtcattatcttcacagtcatcaacattgacttcacaattttctccttcaaatccatcagcacaaatacacctgaacaccacggggagaaaaggcaaaaaacatcttcctgcattttgaaaccatatggtttaaatattgaaaaaggctaaatacactcatcaattacagggttcttaactacaagacattgatttttaaaatgcttttaaataacatgttgtaagtatcgatttacagtgatatcccccaaatcagaaacaatttgaaaagaaaaattatgctggctacaagatggcaaatggccccgtggtcccataactcaataaatccaacatattttcaggtctaaaacataagcgaagtttactttacagtcctacatatctgaatctcaagttgcgtgctaataaaataattcatacttctttgctctgattctgatttttaaaaattacacctatcaccctatgtgtaatgtttttggtgtctcaaaacaaaaaagaaatctgaaaatctaattttgccttccttgcaattataaaatgtgaatgttctctttaaatttcaacaaattcgatttgttttcactggcataacacatgtatatttaatcctgataagtatcagaataatctttgagtaaagtctcaatgaaaaagagacactttcataacagaacgcagaaatgcggtgtatttattataaaaagtgatatttctaacaagctttagtagtagattagccttcttatgtgaaattattagtgtcactataaaaacactatttcataattcatgaagtacatctggcgtaattgtactgtatgattaaataactccagattaaaaatgttcacagcatgtttgtctactcacattgtggcttggaaatgaatcattaattttctgtttcagtgggacctaacatcttatcattacacactgtctttaaagcaatacacaaaacaacagatgaatatatgacttgcagtaggggaccagttggctattcattagcataatagagccactactttgtcttgactgaatcggacttgatttatcataatatgtgcatgtgagtgtctttaaatttcttaattttgtagcatcctgagctgagaacactataatgtctccatttgtttttatatcacagtatctctgagagggactaatacatatttatcttatgaatatatttctggcatactttttaaaataatgccctttgatttgaaaaggaaaatgcgtgtttacttagttattcttgttccagtacttcagacacagaagattacagactgatgacctaccagaatccatctttttctccttcttttaagtggcaagttcctccatgtttacatgggttactgatgcatgcgtgaattgggacatcacagtcctgcccctggggaaggaatggccaaggaaagttgagtgtaagtaaagtagttctcagcacacagacaaagcacaataaaattatgaaggcccaaagcaagctatgttttcatatcgtggttcccacaacagcttctgcttaccttgaaaccatatggacaggtgcagcggtaaaagtcaactggatcattgttacaggtgccatcatttttacatggatttgataagcaggggttacatttagctagaatattgacatccatgggacctaaaaattaattggaaaatatgagaaaattgatgttttctatttttagttcacatcaaattatttcaatgccttaatgtaacaataaattctgtataaaagttattattgatcgcatatctatatgtgtttctcttccaaaaaacccgaaatcagcatcatcatatttcattcgggaacacaacagaaggcctttcttattggggagtatgttcagactctctcacgtcagagagggactctgcggtgtgggcttaagtggttagtatgtgaggttagtgacatcaatgtcacaggatcaatcccctcatgggctgactagcttatgtggatgtgttccatggccaccatctgtaccttaacctcagccagttgtcacggaaatgcgtgccatcgatcccaaagaggactgtgtgtgtgtgtgtgcgtgtgtgtgtgttgaagatgggttggtaagttttacaaataagtagaaattcatcagttcaattaaaaataaaatagtatgcaccttccctgataacattagttcagtagcggtattttcacagaggaaatacaaagcagtgccacttccatgcatacgaaaataaaccaatgtaatctccattatatcctttgggttcagtttgttagcacaggagcacaggcacacaatgggtgagatttttgtatcttcctctccaagaagaaaacagcattaaaatgatctctacttgtaatctcaccttggggatacacattttttaaaaacctcatgatctacgaaagctctaggttaatgcagatacagtagcagccattttcctttggtaacacatatttattcctaaatggctaacaatgcagaaattgtaccatcctcaaaaaaaattatgttccattgatgctacattttgcactgtttatgagagctactagacagccttttggcaactgtctgataaggacactgtcaaagtgacatcttcacacaaaaaatacaaatattttgtaacataaacactatgtttctgctatcaccaatctttcggtagttctttatcctcgttggaatatgcatcaataattccaattgcatgttttggcacacataatttctagtaaagttatctgagtcaattgtatagcatgtcccctctactatcactgctctaaacttctaatgtacctatacccaaaaagtggtatgacttctgctcatacaaactacctttcatcaaatatttctacagattagagtacctatttgtgagttgtcggtctaccaaaagaaactcatgtatgaaagagaatgtgagttaacatggtggccatagagactactcatatctaagtattttcttatcctgggaaataccagtacaatttcatataacagttttgaagtaaaatccaaaaaaggatagtattctgcattgtttagtttttctattaactaaaaaagaaaaggtgaaatatatctacatagagattcccgtttcttttttaacgacttagaaatggatgacagttccagggatggctgtgttcatgggcagggctggtatttgcttttcgtgacacagtcactgagggaggccttgccagtcttcccttcactttttcttggtaaccagaataattaatgcagtcgctatatcaaatgacagctggaaaatttctgggattaatactgaagtgagcctcatagaaatttaatttctcacctctactccaacttatttatcaaataactttagctattcagcacattgcagaactgaatggtggcagttattaaaagcagttagctaaattaacataatatgccacaataaatggctttgtgttggctaaagttatcacacttagaatcagccatagaaaggaagtatctaactagtaatggatcccttagttaggctagaagaaagaatttgacttggaacaaaggcgtgggatgaaacagctaagaatgtataccagcaaaatagcatgtcagcaaatgcaacgactgtaaacactcttctggccacttcccaagaccttgagaacaattgtcttttgatctatttctgtgctttcaaccttgtaagaccgtggtttgaacggaagggttcagggttggcagtttctaagtttattctgtggaatctgatatttttcaaaaattatgtttgattatttaggttctgagaagctggggattgtttatcaaaaaactggatatgaagaatttaagagagtatacaggtaaaaaattgccaggctgaagtagtccctgtgtagtttagcacatagtcaagatttgtttaataatattctctgagtctatctgactaatatgcagattcgaatttctccacatttttccagcactgaatttggtttcctatttagctaatcatgctcaattaccttcagtacctggaatttcttatgggtatacaatgggagattgttgccccctcatatatattgagattagctaaaggaatcaaaataacaagctttcccatgtgcaaaggcttcctctggcagtttcttaaacccgcaaactgttctggtggcatcaggattgggaatacagcaaaatattgagttctaaattcctcaggttggtaaggttgactactatcactacatttattgcttttcctttttttcaaatccttcttttacagtcaattcttcagtcataatttcttatttctggtacttgagcttgagggaaaggcaattgaaaagatgtttgtaaattatataaattccaaatcaccatcctctgatatgtccaaatatctcacaatgatacaattccttttcctattttatttaagttgtaattccacctaatgaaatatccttcgtataatgtgattttttacatctacctggtttacctaaatctgcttatttctatatgcttaccccttggaactacattccttgtatctggctctctcctgtcattcatcttcccactcatattttccccacttctaagtctaccttctatctttttgttgccttcactttgtgattcattttccatgcaggaaactttctctgaggtgctttcctgcaaagttcttattcaaaaggaatgatgtctttaatctgtaatctgtctataataaggaggtgatacaagagctaaagggagatgataaatacagtcataatgaaatggtggaagagttagcatagttctctagaagcaaaccaacacttgtagaattttacgcacttgattattcccaggtgaaacgaagatgtccaggaatagtaattagacaagtcctttagcataatgcattgtaatcttggagagaaaatctgaagtccatcaacccaagttggtaacctacatttgtcacttaagttgtagaattagaagaataatggcagccatgtcaatgggttgttttaagcactggatgacatgctaatgaatgttgagcagggaacatagtgagagcaagcacagaagccacagcaagttctgacatgttcctagatttccaaagaaggcagggcgatgggggaaacataagtggtttacttaaaaggagaaagacgttcatgagttcttctcagtgtccatcacaagttcactgagtaccttctgtctagtgttgctgaaatgtaggggctattattatctaaaccatgggagaatggaagtaggcactgagagataatcatccactgagtaacaacacccagagctaatgattttatggtttttaagaactgcaactgtgatttgtaaatttggcatggacaaaccaccagaaatagcagtacaacattaagaagaagaggttctcttcgttcttgcactgctacttggcaaggaaccatggcttgcttgctgatacaacttcaccaatcttcaatctttcctccttcccaaagttaagtaattccaagaaatgctaaattattaccaacacattagctctcataagatgtgtgccatagaggagaaaagaaatctagcttcagggctacagatgtttactaacgtcactgaaatgaaggaggccagtccgggataactagattgatttaagatttggtcttgacttaagagagtcctgtaacatcagctatatggattggaggtgtgtttagcttaataattcaaagggaaaatgagcagaaagtttggttaacaatttgtcattgtcagttactttaatctttaatggaagaactggcagacctcaaatccattaaagcttataggcagacttgcttacctgactcaaatcactagctatgcatctgacaccaatattgccacccactgagaattgtatctcactttgatttattactaaaagctccagatacaaatttctaagtatatgccagagtctgccttcattctggcatcccatggaaacatgagtcgaataacggaatcctctagcactgccctcatataaagtcagaggtacatcaaagacaactcaggaaaaacataggaaatatttgatgctgggcataattaactaaaaggaggtttttatttaaaaccaaacattctaggctccacttgctattgcattactgcttttcttaagcattaatatcaaacacgtatttttttttttttaaagattttattttttttttcctttttctccccaaagccccccggtacatagttgtatattcttcgttgtgggtccttctagttgtggcatgtgggaagctgcctcagcgtggtttgatgagcagtgccatgtccgcgcccaggattcgaaccaacgaaacactgggccgcctgcagcggagcgtgtgcacttaaccactcggccacggggccagccccacaaacacgtatttttaacaacatttcatcattaagtcattcacttatcaaatatttattgagggcctactttgtgccaggcactacgctaagttttgggcaagtgaaatgcccaagtttctggaaaaacttatagtttagtagtagagacatatatatatatatcaactacatagcacagttgcaagaggatatggataaagggaatacatgttttggaatatgtgttttaagtttctgcaagccatgaagggggaggaattccctaagtgaatggaaatatgaatttgaagctcataagaaaagtcatggctagatatttgaagccatgggattgaaatcaatagatttaatagggttaaggaggaaaccccatgtatgttaatactaaagagcaggaaagaaaggggcgttggcaaaggaatgaagaaagaggcaaggagaatgtacaagaaggagcagtggccatcactgtctaagataaaaagagagcaaataaagataactaaaaagaagccattgatgttggcaagatggaagtcactggtatcctcatagttccagtggaggggtggagatggtctccagatgatagggggttaaagcctatcaatttgcattacataaatggttaactatttaaccttaggctagtaaataaatttctagagtcacaattaaatggtaaagagtaataattattttatggagttattgcatcatagagaatatggatgtacaaaatttaagaacagaatacaaattgtcggttcttatcacctactaaaataaatgtctgttaaaattttcccagtgttttaaattttaaaaagcgtaatgaaaaacagccattatttgtttttttaaagaaggtcagtttggcaaataactctgtatacacctgaatattttctttagccagtgagcaaatcacaatcccaagaagctaaggttatttcaaagttatatatgctatatgctagtgatactgaatctgaaaatgtaaaaaggatttgaccaagtcgtaaatactattttgaaattgatctaagtagtgaatttttcattgcttccagtttgagctaattatttaacttccttcatagtttaattaaatgagtaaggaaaacatcaaccaataattttgaacgacaaaacaaaagatttcaagtttgtcaagaactccttccaaaaagacgttgatcttgctgaaaaaaacccaacagtattacaaagttgttgctgagagatgtgcaattttccccaggaattccagaatctagaggactcttaacatataaaattagtggaagagatcaaccatgtggtggtgaaatgttggtcatctggggctatgaaaatgtcccaggtttcctgacccttcagctgacctttacaaatgaagtaacgcagtatcattgaggaccatatccccgcctctttattacagcttgcggctaccatacacctgcccaatttgggcatcttcctctctttcgtgttccattctcagtttcatatgactcactataagaatctcctgatgccctgatggacctggtggtattggttacaattccataattgtttggtgtgtatatatattattaatatcttatacagtcaagcaccctatgattacattttggtctgtgacaaactacatatatcacagtggtcccataagattagtaccatatagcttagatgtgtaatagactataccatctaggtttgtgtaagtgcactgtacgatgttttcacaatgacaaaattccttaatgtcgcatttctaagaatgtatccctgttgttaagcgacgcatgactgtctatctttctatcaccaacttccatattgttttggaatgatctatgtatgtgtatctattagtacaatataagctccctgaaggcaagagtttttttctgtcctgtttattactgtattattaataccttggaactgtgtctggtgcataacagaaactcacataatatttgttgaataaaagaaggaatgtatcattcatttccattatactgttcactccttagcacatttaagtatttaataaatacctgtcaagttaaaaatgaataatttagttgtctgtatagctaaatcttcttgaaccaagagcaacaaagggaatactagaaattaacaatattctaaattccatgctgactttttcaatgaaaacctggagagggcaaaaacctctgttttattgcagactgcttgatcattctaatttcacctgatatttaaaagatgaggacaggacatttgggttataaagacaagtcatgaccatctgcttcccattcaaaaatactttaatctgagtattaattaaatatgctttgatgacctgcttcatccagtacatttatttctgttgtatactgaaactatgaggttatactataaagaaaatagtctgaagatgcaggataaaaattgtattgaaataattaattactcaaaataatagcatagcctttcctagaagaggaagcattcaaattattacatagctatgtaaacatgtcttcaaacaaggaatattcatcttcctgctgtaattttaaattacaaatctacaaaccacaatattagaagaatgtacttacatgcttttcgcaaataaaataaaacacgttaaactggcataactatgggaaaagttaattaaaatataaaaacaaagtataaaatatttaaagcagcagcattttactgctttcaagctcataaagaatgtaagctcaaaaacacaatactcagtagatttcctagagtgaattattttaattaataaattagaatacttggctttctactaatccatttattatgaaaatatttcagcaaagcatgccagagtgcttcaaaactattattttctaagtatgtttcaatagtagggtggcattctttttatattgataatttgtttggagaatatttttattgaaaattataaagtagtggtaaaccctggaggcagagagtcaaggttcaaattctggctctttcatttagcatcgcagagactcaatctctctaaattacattttcatctctcaaacggggaaataatagtgcctactacaagaatgatgtaaagattaaaagagataaaaatttctgtagaattctcagcacaatgcaaactgctcaattgaagttaactgttattattattgctataattattattattagtagtagcagcagtagtattggcaaagattcagtttgaattgtcataaagtttgaactaccagagtcttaagacaatgaaacttcacaatattttgacaaatggcgagaaatgctatcaaagggcattatgagtttcaacgtttgctatcactaaaattatattaaggtatagaaaaactgagcagatattaaagtctgctaaatgcaattacactatatttgttgagttctgaatgtctacacttcttgccaactggcctacacccacgcagtctgctacccagtttaggatataccttgaaataatctgttgatttgataacttagttaatactgaactgccagagttccagcattttcctacagcacagctctgctcctgtacttccacccacctgtagtgctgtcctcatacttgtctgcttgtccaaacagctggcttagacacttgcactaagtctttcacaacactctcctccgacacaatttcttcctctgagcccttgtagcaactgtgctatccaatatggcagccactatctacatgtggctatttaagtttaaattacagaaaattaaaaattcactttctcaattgtataaactacatttcaacaaccacatgtggctagtggctaccatattggatagcacagatacagaacactgtcattgtagaaagttctatcaggtagcactgatctagaccaattttgcctcaaatatatttcatgttacactaagtatatgagatgctacagtcattaaatgataaaaggtcaaattagttagctaaatcatgagttaaagagacatctatgtatgtatataaatgtgtattggacttctgagaacctttaataaattaacgtataccatgatgctctaagaatagaatataagtatgtagcttttctcaaatttgtgttattgtaaaattttttttttcaagaaatatctccagtgaactctacattttaagaaatacagataagcaccagcattttttgacatgaggtacaagtatcccgggctacagagaagggggacacagtcagtttgtagtttctcaacttccccatataatctttctaaaaccaatctgcccaataacatgcctaagagtaagcttttatgccagtgtctccttccctatctcccctttgacaatcatctccacttcacaaaagaacagtatatctcttagcccaccagaaatttaccatggggcactgccccaaggaaacatctggggtcacaaaaggacaattttaaaatattggttatttgaaaagtctcttgcaatcaatgtacataatcccagagaggcatcttcaataaaacttcatttttgatttttaataaaaatagtaaaatactgataaataattatactgtctcaacaatgatgcatgattattaatggcaacaattcaaagaaaactttagaaactcacagacttttggtggcaggaaattttaaacattcaaattatatgcttttttttatagtaaagaatgatgcaattctctgaggtactggaaataggaattaaaggggaaaaacagaagttcaagggaaaagaacaatataaaatgttatagagaatcttgtttttgtctcttttaaaattagctgtaatatttagattccatcaaatacatttaaaacaataatggaagagtcttattttaaaatgtcaatatttacaatgtgctgcaaattacatcttttgcaaccatttatagctatgaaaaaaattagatgtcaacttcaaagtgtttggagggaatatagtttttgaaaattctttcttttatcaataaatcatggagtgtctcacatcatttttttgttagtgttttgaaaagcaatgttataataaaattagcagctaacatactgggtgcttactgcatatgagacagcacgttttacattattaactattttttttccaactttattgaggaataattgacaaatataattgtgtatatttaaagtgtacagtgtgagatttgacatacatttacattgtggaataattactaagagcaagataattaacatgtccatcacctcatacagttaactcctttttttttttacgcttaagatctgctctcagctactttcaagtgtacaacaccatattattaattatagtcaccacgctgtgcattagatcatcagcatttattcttcactgaaagtttgtactctttgacctgcatctccccatttccccttcccctcagtctctggcaacctttattctattctgttcctataaaatcagtttttttcttttctttagattccgcatatagtaattcatctaatcttaacaaaactcttaccaggtacatacaatcatcacttctgcttacacatgaggaaactgaggcacagcctggttaagctactaaatcaaagttacataactactgaaacgcaaagatgggatttagcccaggctatgtcccactgcctaatattacctacttagatacgtgtatcctacctaaacgtttgagcgtcgaaagcttatattttctgccaggtctgcaagccttggaagacaaggccatactgtaagcttctctatgctcttcaatacctgggattttgttttacacataaaacatgtttaacaaacatttactgattatacacttagaattttcaagaatttctcttctccatctaataattatgagcggtcctctttaaacatttacaaattaagaatcatagcaaccttctatctcatttgtggtaaggaacataaacccatatatttgactggaaaaaatggaaagatatgtgaaacaagcttaatagtggttatctctaggttattgtgattaacggttaattttagttcttgcagaaacagaatgtttcttattgttcacattttccttttctttagattttctatgttgggcatatactactcttgtaacaagagaagagaagatttgttactaagacactattttgaattcacagatacataaaacagagggaaaaagagggataagaacaaggaagaaatagccacattaacacaggaagagcgcagcacaggaggcaagtctgaggtttggcctgaacactggggagggcttgtttctccttacctgccatcaggaagccacagggccctggcagccctaggagcagggcacacgttcagacaaggcaaaagcaaaacatttcacttgttagaggctatgagaggaagttccagaaatcgtgcactcttcatttcttcatacattttaaagaaaatgtagtcatttccaaaggactatttctgagatttatttgaaaaacctagttctttacttgggctcctaggtcttgtccaagcatgggtggaaacaggaattgtttgttggggcttttcagctataactttgaggcctaggggcaaatggtttccttttccttttgaaattaacactgcgaatatttatttacagaagtagaaatgattaaaagccataccttgacatgtaaattttttggagggagttgtgagtaacagtttatctgccatttctccagggccagcacagcgagcaattcccggttctttatattctgactttacccagtcggataaccactgcatgttacaatcacagtaaagagggttggctccaattgctctggaaaaacaacaccacaaaagcacacacacacaaaagtacggaagtactgttatttcctaagggaacataacccaaaccgatgcttagtagaaaatctctatagatttcttgatgattataatttagaagaaaatggagacattggggattccccattttcctgaattatgtgcatctgagatttagtgagttgtcaatagtgttaacactcatccgggctttacaaggtctctttacatttgcagagacaggtgcatattgagtgcaagcatacctaagtacagattaacacttctttcattcaccaattatttactgaaaacccagtcgctattctagattctggggacccaaatatgaataacacattattctgaaaaggagattaacgtataacatacactcatacattaaaataattgtcattaggagtgttatggtagaagtttttacaagatgactgtcaactgaaggtgaccgttctggaggactggtgatttaaaaagtctacacttttagatagttagattcaagtaggtggataaagttgggaaggatgtttcagagtaaaagaccagtaagtacaaaggcatgaagataagaaggggcacgaaataataaatatacataaagttagtccaccagagctgatcttgaccttcgcttggtgtctccctttacaacgtctttcagctggaactctggttcctactcacataggcaggtagtgacagggagagtaatcaatataataagtaacacttattgcaccattataatatgcaggaactgtgcaaagccatttacatgaattacttcattttatcctaaatagcaagtctatgaggtcaatactactaataatccatttacagattaagaaattaatgccagagggccagccctggtgctctagcggtcaagttcgttatgctctgcttcggtggcccaggttcagttcctgggtgcagacctaagccactcgtctgtcagcagccacgctgtcgtggtggttcacatacaaaaagaggaagattggccacatatgttacctcagggcaaatcttcctcagcaaaaagagttggcaaacttgccaagtttgggcacaagtagtagatgcacaaagtagcatttaaaaaactgattaattctgatttatatttaacttgtgattagtaattcttctaggtctaccgtctaagcaaaactatcttattcttttatcaggaaaccccaaaatacacttgtaaaaccataatactttatgttgtagcagttttaatgcccaactctaaccaagaattggagtgtaaaatattatgctcatgtgtctgtcatattcaaacccttctaaattaaaaatgagcaaaatgatatttttgaataatttgatctcatctctactgacatttgctaagcccttgcatgggggctcagcggaaaaagtgaatggagctgatatgatctagggagtaaaagataaatgtataaatgaaatacatgacagaacaggacacaggacaaagaagactcaaatggctttcactctagaggcaggagttaggagggagtggcacataaaggaaagttctgcttgactcaagcagcacctttcctaggcagccttttctgataaaccacccccacactagcagaatggccactttctcctctatgctccattctttgccagacagtatggcagccctgcaaccctgagctagggacctcattcacattttctctcaggcaaatgacatccacagagtttgcagggggttgccttgatgttgactttcagtaggggctgaggcttacacatggaaaagtgaaggtcttgcctcctgggacctaacagtttagaggaagggatattaacagtacacaccaaacagtgtgtcagatatgcaaaatacctagattgataacagagtccccaaaaggcacattcagatacagcatgattgactactgcctcctgcctctgccaatccccctgtctcacttttctaaacttcttatcttcatggggtttagtgggttttggagggggagggcaaagccaggagataatacggcagcaacctctgttggggaacttggagccaatggacactgatacttaagctgaagcaggtgagcgccatcaggtgatgccaaactcagcctgaccctccaaggctttggattctagggctgctgtctgaacttcttccagttttgccatggtcttaacactacaactcaaaataatggaatttgagccaacacagttttttggactccttttatcacacatttttaaattgttttattgcatttccaagaaatacagaggtacaaacaggctgctaggagagagaacacaaaggaaaaacatttacccaaaatgaggatttagctgtttccccctaccacattgcaaagtcttgaatctctctaatttatttctgcatggtgccatatcaaagctgagtaatatttgctcaataaatgaatccagtttgatcaagtcaggatacgcttcacggaggactcgatacctgagaggtcacttggaaatgtagggtttgggcagatctaactgaaggggagctgatattctagaatcagagaacattaagagaaaaggcataggctgggaagttgaggagccgtgtttgtaagaagagatcattttagctaagcaaagagaactcaaataatggggagtaagagccaaaaggataaaattaaggctaccttgtagagggtatcatatctcgattgaaaatcttgagcttttctttaaaaatggaaccaatcacatcttacgatgttacagtaaaagggtggcagaggtctgtttgttccaaactcacttgccagggagagtttgactctaaacccaccttcgtgaactaggtactcacaggtgtgataatgcagaaagatcgttgaaggcaccttcaggcacaacagaaatgtcatttccatgtaaagaactaaaagcgaaaaaaagcagaattaaatttcccacatttcagagagttcaagaaaattcccatgcatgtatgagaatttagtttataataagcattttaaatcagtgcagaatagatgatctattcaataaatagtcttggtacaactgggtatatatctgtaaaagtaaaaagttagtttctacctcatataatatgtgtaaaataaattctaggttgaagagttaaacgtaaaaataaaactaaaatgtattaaaagaaaatatagaagagctcctttttataaacatgggatgggaaaggctttcaaaagcattatataaaactcaggaaccacaaaggaaaagagtgataaatttttgacaacataaaatatatccataatatgaaagacacaaggaataattctgtaaaaggagttgcaaacttagaagtcaagtagtggatgcacaaagatatgtatgttaacaaggaaaagacaaaatacccaacagaagatggaaaatgatatgatcaggcttattgaataagaagcacaaatgctcactaaacaagcaaaatatactcaaatactctagtaattggaattgcaattaaaacaggaatagaaaataatgttcaatctttcatatgatgaaaatgaaaggattaataatattcaatattttcaagcgtgctttgaaacaggtactctattaaaatagaattgctagaaaataaatttgtaaattgacaaaatcctcttttgggggacaacttgacagttacttctggtattctcgcgatatacttgacagtaagatgaacgtgtaggatgttcactccagcactgtgtagaagaattaaaatttggaatcaaaccaaatgatagtagagatgaggacgattaaataagttatagttccttcatcctatggaatactctataccagttaaacagttgaggaatctttttatgtgatggaatggaaggaaataggctaaagcatgttgttaaataaaaatagccaaaggtagaacaagaacaaatcttatttatggtttttaaaagttatatagccagggacatacatatatcagtatacaaaaaattgcatataaaaaggaccagaaaagaacatccaactatttaactgttgattctaggggaagggattgggactgaggatcatgttttatttcatatactttaaaatatatttttaatggcaaaaatgtatttctgtgttatgtaatttttaaagaaattaaaatttcctatacttctttcaaaattagttggatctatatgaaacatacatcttaatatttatataatcaaataaatgactacagcaccttgttacgaaagagaaaattatgttgttcaaataaaagctgttgagcaatgatacaataagatacaattttcctacttccaaatttgtagtaaatcctaatgcaaatatctaaaaatactcaagaatcaacaaagcagttaaattattaaattattaaagttaaattattatttctcagatcactgagaaaagaagtgttttgaacataaaatgcttacagtaatctgagagacttcaatccatcgaaggttcgaggaggaatacatctcaaacggttgtaactaagaattctgaaagcacaagtaagccaatttgttttactcaggtataccataatggccaaatgtcatttttaaagcaaagcagttaagaaaagagctatttaagcatcttataaattgagaatattgatgcatagtacatatttttaatctttctgtagtttcactaatacaacatatttatttctaaatatggtctagaatgcttccaaggctgatgcctcaactatgcccagcccccgccccccaagtgactttcctcagaggtctgccttaaggatctctcccagctccaccacaaacaaaaactgttctttgtttcttttacagagcccaatactttttataatatctgtatttgtctgtttattgaggttttatttgtctgtttctcccaacagtatttacattccttgagggcagagactctctctgtcttgtttaccaggaatgtccagggcctagaaaatgcattttgtccagtgaattaataaatattcagtaccacacattcacactcacaaggtgaggagctgggtcatgttgctgaagctctgattagaaagggtgcttattcggttgttacttaagtctctaaaatggaaaaagaaagaaatggagtctgctgttaccacagaaattgaaatattagtgattcttagaaagagaaagatcttcttgttcacagcagattgttaacactcagcttttatctgaaaatagcaaaacactgggtaactctctggggtagactgtaatgttattcataattattcacacccttgcctgttgaaattagaagtgaccacatgccttgctttggctgatgaagtgtgggcagcagtgccagcttcacttcagaacagagcttcagaaggagctcactttttccatatccctctgctttcttccctgcaagacctgtgatggtccacagagagcccacacctgttatcaggtcctggagcagagactgcggaggcactcacaacagacacattttatgagtgagaaataaacctttgctcttgaaagttccattgcttacacatacttccttgtcattgatacatacactgactgatagacatatgtaaatttgaatattgaaagaatgcctcatttaattacactcacaatgccatcattaaaaacaatgccatcattaaaactttgccctgagcaaagtcactggcaaatagtaggtcttcagtaaatatctgtttaatgaatgataagtaaatgtggattttttaccaatgctaaacggctattaatgggtactttgtactatgggttgtaatttatattcagtgaacttgaccttatttttattatatataatatatatgagatatatataatatgacatataatatatattataaatacaatataataatataatatataatgtaatctaataatacaaaatgacatgtatattttgcattttgttttagaaaaaaattagtgaatatatacacattcacactcacctttatatgacaatgtgacacacattagtaaatatgtataaattcactaattttgttctaaagcaaaatgccaaatatatgaataaaaggaagattcatgaataaacagaagattatgggtcataatttatgttcctttatgtgtgtgtatttatattcactgttttttctgaagcaaagtagatgaataaatgaaagattcagaaaagcttaagattagccgtttcttcattaaaataccaaaatatcagtaaaatgaaccaataaaattgtgaaaatggtaggaatgttataggagctttataatcccttatcttcttagctgcagaattactataccaaaactttaaaaataaataaatatatctatgttagcagaagttacttgcctagagttgcataaggaatcattagtaaaagcatttctggatctacaaattctcatttttcatttccaaactggttttaaataatcacatgctgtcccacaaatgacccaattctgctgaagtgaccctttggaaattgcagcaatttaatggtttatttaaccgaagaaaatgtatgtaatcagtttttgctgctattaaataaataacgagaggcagaataagaccttttagaagacattctctcttttcttaatttaatctttcgtcatttaaacagtcttacacacatttacaaagcgtttgattttcccatacttttaaggaaaactaaaaatgatcaacagcattttagctaacctccatctgcctaggataaagcatacattgagaaatgtaacatttttctgctacctaagtttctagaattcactagttaggaataaacctccttattctaggaatactagaaatccacctcctaagccgactagtcatatttactctaaaatcagatagatttaaactaaagataaagcatttccctttacatccactatcgttgctaattttttgttttgtgagaagttttatcaactactaacctagctacgctgtgtgacattatatatagtaagattatacatatttttaaacagtgtgcacataaccttattgaaatgttggtatgtttaaatatcatcttgtattcacaacttaaagatggcaaaaactgtttacatacgttaccaaaaaaatatgttattttaggaggacatcaaaccaaattaaaaaataattcaatgttttgaaatttataccccaaatgtctgcatctttgacaagtttacttaaatgctgtgtaagtaactacggattttagaaaatagattttaatactggaagcccataacttaattcataatgtattttatataagagaataaaacctaataaactagatttcaaatacattttcagtaaagttactactatctactatcttttgcttaaagtcaagaataaaaatattgttttccatctttctttccttggcttgtcataaaatagccttattcattatcaatttactgcattcattatgtacaatattcattaccgatttactgcatttctataattctttgatactcatacttaatcgtatttgtactttgaataaaggaggacctttttctaagacactccatcgcctgattgatattcaatgaagatgtagctagtgatccagaacttcaacgagcaaggagggagccatctaactgtaaatgatttattttatctgaaaggttcactaaatcttctgctccttgctatccccattttcatgaaacagaataagaagtcaaagacagaaaaatataatacattacttacataagtgttaaatgtttgtagttagagagttccttaggaaccagtgtaaattggttcccatccagatacctaaaaataaggaaacaatagtatcttttttaaagtaacagtagtgtatcataaaatagttgaacaatatttcactcttcattgaggcagggaagcacttggcagatttgtctttaagaggtcatgttcttagctgggatgtttatttaagagaaataaagaaaaaaaaaagccgtgttgtccaatccagtataattattttgcggatcacttaggttaaattataaaaccaaggggagactggtgagtccagttctttgcggtttatctaagaaggcaaggcatgtatgcaaccacttgtgtgtcagcaagaaggttcattcaaccaaccatagttttagtcagcctccagttcgcttgtttttatctggagacaatgccatgaaatgcattcactactggcagaaccttgctactgaggacaagacttctcttcaatgctttcgtggatatcaatacagttagtaaataaagatcggtgctttaaaagagatacttgggaatttaaaaataattagatttcaattaaaaatatctttgaaatagtttttatcactgtatatacagcttggtaataataattttaggaggtttcataggaaatcacaacatttatcaaatatacaaatatatcatatatatgcaaaagcaataatcagatggccacatataagtaaattttccctttccgattagagttagcagaataatcagaaaatagataggttgtgggctaactggcaagacacaaaaataaaggaatgcttaaagttatatccatgatgtcacaaaaagaaaaataaatttcatctccaaggctgttctttccgagaatatagtggtgaggagtaaaaatgtccttcagttccttggtcatctgcctatagatgtgcccccaaacaattctggcatgttgggcacatgagcccgcctgcctcagtgttgtggtcagtcttgagatccaaggttgaagttagcatttttgctgaatacagaagtagctaagaaatttcctgagtcaacaatgtatatttcaaatatttcaaaatgaaaactgatatataaaaggcacaaatgatcaaaatatgtaataaatatttgattgagagtcgggcatatgttacgaccctttatgcctactcaaatttttgtatttcaacttctctcctttttcttctagctaagtatttcctgttaccactagagggcagcataatcccatagacttcagcactcttcctttattccagaaacagcacaacagaaagctaaaaagattcagaatgtgcactatggatgtctacatgtaaaacaatctaagagggaaattatatggaactgattaaaagtaatggataccatttgttcagaattgtccaccaatacatacttatttttgccaaattctttaataatttaatataacacacacatgaaatttttctaatgcgtgcatatatgttactgcagagaaaaatcctgctgacttggtacgattctaagaacaagctttctgggaagtaaaactagaattcgcaagagatgagttattttcctcatctctataacattttctttagaaaaaaaaggattactttttaataatttgtagagaaatagactgaagatttgactatgtgacagaagaaatagacagatggcatagacaggacaagaatcaaatagtttcttagatgtagtttagtaaggaaattaaaggacgtttaaaattattggatggaaatcaggcaaaacaactaaaacatgggccagttaaatggtagaagaagagatttagcatcaaagatgatctgaatctgtgtgttatgttcttggctggggtgctcctagaatcaatgctttgcatacagaatactatagctatctagcttgccgacactgagggagtaatcttctgaaataaacacacactaaagtaagaattaagtatttaattacacacacacaccaagcagtgcttatagttaattaacaactgtgaatggtgacaagagagagaaactgaacactttacgacaattcaaatctaagagagaccttctgtacatacgtgctaagattacaccttttttctctaagtgttcaagactgaattaagattcatggaactgcacacgatctgaaaacaagctcttcaataactgaaatgacatcttcttgaaactcatttcctatgttctatgttgcccaaagtttatcaaagctgctcatttggaatacttgtacacatctacatgaattacaggtacatatttgcatgaattacatttagacttaaaccatttttgatacatgcttccatacaaataaaaaaataaacagaggcaaaataactcaactgcatatcaagcatttgtacatagtacattagtataaaaggaatggaatggagcacgcatgcgtcattgttccatgcgacttattttctgatttatttcattccacatatatagcatgagacagctaaggaagtgtggatagtgcttaaaatctagttatgtgcatattggccatgtaatttgtggttgaatatcagttatgaaaatgttagggataattagcctcatactctttacaatctaaaggactttgattcaagcccaaagagcagtgtctcttttaagggtaaggattatgccagcttcttctacatcccagatatttacgtatcctatatggtgagatattctcccaggggacacaatggtaaagaataattaaccatatggaatatcctagacattggagataaactaaatatatagcatttcccaaggtgcatttgatggaacatactccatgagaaaagatccatagggacaaataagtacgggagctaccttatatttttaccgtcttctcttggagcttcactgtgcactttagcataataaaggcactgagaaaccctacaatgaaaaaacccagaaacacacaaccagcatttcccaagggtatctgaactagcttttattatttgtttagaattttacatgatacaaattaatggcccatagaatgtaatttgcaaacaggactctaaagatttttgtttggtctccatctcccttggtgtgtgaaatattaattgttcagaaaagggaaagatgagctttacttacaattcggtgacatctttgggaattcctttgggtaagaccttcaaggccttgttgctacatcgcacgactgtatccaagcaagtacattccgtaggacagcgagagaggggggaacaactattgtcatcatttcctaaattgccaaaagaaacacaggaaaacccagatttgtggctttgaagatgctagacgggattgtgtgcatttaaattaatgtaataaacacagaagtcttgagacatatgatcacttatgtgtagggcattaagtatttacaaacagctgccatacattttatatagcactgttttcatattgcctagggctgaattccaaaaaataattcacaatttatattatcaatacaattataattgtattttctttgttcagttatttatacaaattataattagaatatataaatctaaactgaattatggagaaattgtaaggagacagacatgcagaggcacaaagggacagattaatcttaaaaatttagcaaaaattgtaagggcccctcattttaaaatacggggctcaaatgaactctccattcactggcaataataatagaaccagctccacctaccttacaaggctacgtaatgcaatgcaattatgcaccaaatgcaatgacatacagaaagcattaaaaagtggcaactattattcttgttagatttactagaatttctatttataagtcaattgcttttctcatttgaaaatcgtagttactaaaaaaatgcttaggataataaagaaaagttaaaatgaagctatataaatagtaatcaaccacaagttagagactggaaaatcttctaaaacattcagaaacacaacgtagactcagatgtgaaagtgcagtctgagaaagtgtcctgttgctcaaacaagacaaaacaaaacaacagagcaaaaggtgcaccataactgttgcctgaactatgatacgctgtactgttgtgccctgcagcatcaggactaccatatgatccacttactccactgctgggtatttatccaaagagcacggaaacatgaatgtgtaaagatatatgcacacctacattcactgcaacattattcacaatagccaagacttggaagcaacctaggtgcccatcaaaggacaaatggataaagaagatgtggtatttatacataatagaatactactcaactacagaaaaagatgaaatcaaggtccaacatggatggaccttgagggtattaggctaagtgaaataagccaaacagagaaagtcaaatgctgtatgatctcactcacaagtagaagataaaaacaacaacaacaacaacacataaatacagagattagactggtgggtaccagagtgcaacaggggagcgaggagggagaaagatgtgacagggcacgtgtgtacagcaatggatggtaatcagtctttgggtggtgaacataatgtagtctccacagaaatcaaaacataatgatgtacacatgaaatttatataatgttataaaccaaggttacctcagtaaaaaaataaaaagaaagagaaataactatttgtaaagcaaatgaagaagagaatggcatggaagcataaactgccacaccaaaaaagtccatggcctattataattagaaaaaccttaaactcagtctttaagatgatttttccaattgaaatgaagctacatgtggctgagaggcagggatactggggagtgactgctaatggggacagagtttctatttggggtgacgaaaatgttctgaaattaaatagtggtgatggttgcacaactctgtgaatttactacaccccacttaatggtgcactttaaaagggtgaattctgtggcatgtgaactatacttcaatgaagctgttatttaaaaaaaaaaaaaagaacagaacagtccctttaacacctgaagatcaaagatttggcaagctttcttaccatcatcacaagtgaagtcttgaatggcaacatcctggatggggatttctttgaggaagtatggtttttgacatcgaggatttccggttacaattcttttcttcctgagccattctcccaaccaagccaggtagcagttacagttaaagggattggccaagaggtttctaagcgtcacatgcaaacaatgcagatttgagtttagggtttcactttcttcttcttcccaaaaccccaggctaccattttcccacactatttctgttggaatgattccttcttatctgtatcctccccaccccattcatatccaatcactcgacatatgagatgattttttggggtccaaaatttttatgcttgtaccttaaaaaatagcaacaatactttcatataaggattcttcaaataatttcatgcaaaaaataaagtgaaggcagcaatttagggtttatgcagtggttcctgatagatatctcttttagagataatttaaacttgtcagaaatctgacttgctgtcaaacttccccacactgataatgcagtaatttaatataaagatgaaggctgattaccttatattattgagtttaacctgacaacagctatttcattaatttgtcatttcaagatttccatcttttatttgctccagagaataggtttcccatctaaagtgacagctgggttgattaaatgccggttataaaaatgaatttacttctacaaatcttggtacttttggcatctcaccacttcatcacgaacctattgacaatcccattatttataaacatgccatctttaatatgcacaaattagtcagtcgatgtaaaatgtcacattttatgtgaaaagaggattaagtaccttactgatggatggatgcttctctcaaataatttcttcagtgacttgagctatgttgaacatgctttttttgtatcttttgatttagattagtatgtttagatgccaccaatactaggaaatcatatcagttagatttatcatctcaaacacctatttttagatactttcatacaagaggactgaaatacattgttcggagatggggtgttttttgctactttctgagttctgtctataaacctacaaatactctttattctcgaactgtctacataaaatatcctcttgaagaggctcaacctatttcttcaatatttttctaatatcatagtaaatgccctctagtgaacagctttattattggtctggtcatcctaatgtatctcctgtcattgtgaatgatccttttgagcttagtttgttggcaataaccctataaactctgtttttatgatacttacattgaaaagaccccactgagagaacactggggaaaatctttaacatttcttttatttgcagcacaatcaagttataataagattaaaatttataaattaagccatgtcacattattataaaaaataattgactgaaaaatattataattcttattacattttaatataagatagtaggtaatatttttagaaaattaacacaagtttaacacgaacaaatttgtcctttttaaaaaatactaaatccttgatcatgtttttatgaaatgcctaataatgcattaaaatgttattaatacaaggaaaaatataacacactggctgaagtaatacataaatgaggacaacgtttcatactcacagagtagataaagaatggagagtatcaaatgcccctggtgcaattgtagtaatttggttatcatataacgaaagcagacgcacagaactgagtcctatgaaactctcattcccaacacagcttatgcgattgcttctcagcatcctgagggaagagagagaacattgttatagtgataaagcatcaggaaatcaattttgcctatctgaggaccaaaataaccccttgttgcaaacatgtagcattcactactgttttctgaatgtttttgtgttattaggaattggtgtggatgtgtactgagaacgcttgcaagaataaaacgcctagagttgtcaatgataacactcagttacaaaatgcacagtgagtctcagcatggacttacaacccagtctgatgagggtagaatgttttcctttgatgctataattatgtttgcatgattacagaacatcctaattcacctacagctctctaagcccttgaagtcctgtgatttgtgtattcatgtagcattacacctgaggttgaacagaaaggaggcagaaaacgatcaataaccacagcagataaagaactgagggcatctcagcgacttatatgccaagtcaatgtcaacaagggcgggggtgccaaacttgactgagcacccacaaagcttgcataaattattttatgaaaattatttcagtgttttaggtttagaacttaaaaagaggcaatagttaacagatcccagttgttcacaatgcagtttaaataggcttctctcgaaaaattaggaccatttttttttcagtcattgccacttgattaatactctggtcactgctacattttggttcagctctcaattatttactaaactgcttatttgtgaggattataaaaggagtgaaaagtttctaaaaagcctatgtaaaaatgaacagttgccataaatcttatccagaattgctgagttaatttgttttccttaattttcctaaacatgagttgaccaccccaccagaagattgcagtgtgtaaaaaagagaggtaaaaataaattaacaccacaatgttcctttaaaaatctagatttccctacaataaataaaaaatatcaagttttgcattctgctaagtcacagataagaagaaaggatgatgccatccttaccaagacatcattttatgataagaaacaaatgcacaacagaaacgtatttctgtcagcactatcctttgccataaataataaagagcacttggtcttaatcttgtttgagttatggatccttgggagaagttgaagaaagctttgctttctgttgctagaaaaatccatgagcacacatgggtaccacattttgcctccaatcggggattcaaggactcactgaaatatgtatgtgtaccactaagagttagtagttaaattaggacacatactaattctaaagagttaagaagtctaggggcaatggggatgtcttgccaaaatctttacagttataagctgaaagataccacttagaggaatagatctgtccagataaacccattctaggcctttgaataccctgagcttggctctaaatgctttatcatgcttgtcggccacagtgggattaagtagagatcagtgagtgtctgtctccagagccaaaatatgagaggcctcaaaacactaccggagatataatgaaggagaaagatgaatttagagaacttgtctcagggagagtcctgtgaatggaattaggaggcagccatctataaaccaagaagagatctcaccagaaactaacccttgccataccctgatcttgcactttcagcctccagaaccacgagaaaacaagcctctgttgtctaagtcatccaaatgtggtatcttgttatggcagcccaaggcagactaagataggtggagttataggctcctcccaccccacctctgtactgctcctgcaagaagtttctagtaaggagtagtccctctactgtctaagaagggaggcttctgcttgtagcaggatttgtgctttgctgagttacctgagacagcttgggggagggagcggggacagaaggaggagcagccacctggggtatagcttctctgccctccatctgcacattcctcaggatctcctccagaaaaggtccgaaggaatctttgcgtaacatgttgaaggggctccaagtcagcccaagggagaggtcagcaggctgcaggctggtgctgctggatgggtaggttccaggccacccctgtgaagctcaaggggagtgcttctgctttcatgtgcagaggattttcaggaggatttgaatttgggatgctattaacacatccccactggcgggggcagtgtccttctccctctgcatctgataagcagcaggcaagggatgtcccaggctatcagtccccctgggtgtggctatgaggggctatgcggggcagggtgagggtttagaggagagcttggccttctctccacggcaatcaccaaaggctgcttcttggttacaaatagtttccttcatgtcttccaaaggcttcagagtttggtttgtgtctccttcaattttcaggccaccacttttgtcaaacataattacacatcttagagataataatacagactacatatatgcactgtagaacattcaaataacttaaagtgttgtctgtactagtcaacccaatcctcatcctccttggccaacaatctttgggaaacagagacagtttctttttcccaacctccccactcctgagcaaggagacagaactctcggcatgttttctttgaaatagatagtaaaagatctaccaccagtcagtctctctgtctttgactaagactttgcaggggcagacaaagggggttctagataaggtgttagttattttgcctcaggggttggagaagacactgaagctagtgactttgggccaagcgggagtcttagatggaggtgtttgaggaagaggaaagagaatggtcattctgaggcaaaccggggagccagagctgcacaagcatggagcaaggacaatcattttcactgaggaattagcagccaagagagattcttgatcttttgcaagcaacatactgaagtcaggagtaatggggtaagagacagtttgcatccacaaaacgtgtgtgtgtgagagagacagagctgggctgggggatgaggaagagtcggagccgccccctcccagggtccgaatgaccaatgagccacaatcctgcgggagaagaatcacaaggcaaataagaatactcacaaagttttgaggctttccaatcccttgaacatcttatgttgaacgttttccaaacgattacttgtgagaagtatttcgtttacacctgatgctccttcaaatgctccctcttcaatgtctgtgatcttattgttgctaaagtttctaaataaaaattgttgagacaagaattttaaacaatttctaacaatgaaggcactgaaagaatatgattgatcattttcttctactgaacaaagtcttccacagtctgcaagctcttcactgcccagcactcccaaggctctgaaaagacgctactttcctattccatcaagtcaaagtgataagaatactaagggggaatgcctatggtgaaaaacaccagcccaatcaatgcgaaaatggtctgcaagggtccccaggagaagaaaattctagacatcaggtatggagctgcataaacctttatgtctgccataaaacttaatagggaaaagaaatgcccctgcttaaaactattcaatgaattaatgactaaaagaaggcaactgggtagagagaagaaggatggactaaaatgtcttcatgtttagatagcatcagaaatgtatctgaatatgggtttattctcaaactgctcatataataatgtttcaaagcaatcaacttaactgtcagtattttgtttaatacaaaatactacaatgcttgcccagagggcaagaatgtccagttgagacaacacctttctataggttctttctctttctcctagactaggagtgccctcagaacaaggatcatttttatgtgtcattttattcccctcagagcattgcacatagtagctgctcagtgaatatgtattcaattaaaaggcatcttagagctgaaaagcaagagcagttagtgtcagtgaataaggagaacaattagacaattagaaactcttcaggaggcagtagagtataggggtcaagtgcgcaggaagtgttttcagtctgctctgtcacttacagtgtacgtgactgtgggccagttacgtatacaaaagcacagctatcacggaagaattctttcctccttctgagggttcctcatatgtgcagggggcttcattgtccttacacttttggcctctctcctgcccctccctcctcctcaccgagggcagagtactgtctgagtgttcttgaaactgctgagcttataaacatattttaaaatatgaattgtggacacgtcgtagtacagatgagctatcaagccagtttaccaatcattaattttgactatattctaatgaaagtttaatgaagcaaaaagtcaaatagttgacacgaatgtgctgaaagagaaataacagcatggtttggggaatagtaaaggaagttacaaaacattactgaatccatctctaatgtgcttagattgctggattcctgctgtggccacagaacagaccagctgtctgagttaaagtaagatgctagggctctgctacagaaaatgtggttgacatcgtttgaatacatacagaagagctgattactcaggttcctctcagagattaccctaaattcatgtcacaggtagtcattgcatggaaatttccctggatcttttatattttccaatttccaaagaaatctaaataaaactgcaaaagcacgggaaaagcacagcaaaatactacagaaatataaaaagatggctaacgcacggcttacattttacgtaactgaggaagtttcttgaagattcctgtagcttccaacaccgtgaattcattattattgagacgcctggggaaacagaaaagtttcattaccaacagccaggaagggattaaattttatttttcatacagaattataacattatttaatgattatcctaaagcaaaatataagacatatcttagaagatttgtggaaagtattgattttttcccatttcactcaaattttaaggatcaaaataaaatataagaagaagcatatagtagagaagattgataatcaaaaatcaaaatcagctctttcagtaatatgtaaaacaaggtttctcaaactttatttttcactattgccccactgcctaaaagcattttagacgattaattttcctaatcagttgttccatcaattttttcactaacagctttgatttacaatttacatgtcataaagtgcacccttttgtgcaattccttggtttttagtatattcacaaaattgtgcaaccatctttgctctctaactctagcacaccttcattatccgaaaaagaaatcccatacgcaccggcagtccctcctaatttgctgcccaccactgcctcagtcctttcatttactttctacctctatggatttttctattctggacatttcatataaatggaatgtggccttttgtgtctggcttctttcactttgcataatgcttacgaggttcatctgtgtttagcatttatgagtacttcattccttttcatggccaaataatattccaccacgtggacatactacattttgcttatccatctgtcagttgaggagtatttgcatggcttccatatttttgattattatgaataatgctgctataaacatcagtgtacaagttttcgcatgaacacatgatttcagttcttttcaatatatacataggtgtggcattgctgggtcacgtggtaaaactatgttcctctttgaggaagagccaaactgttttccaaaggtgaggcaccattttacattcccacaagcaacatatgaggagtgtaatttctctcacttgttattgtcctttttttgtttttatagctattttaggggatgtgaagtgttacctcattgtggttttgatttgcatttccctaatacataatgatactgaacattttttcatatgcttattggccatttgcatctcttctcggagaaacatccatacaaataattttttaactgggtaatgtacattttttattgagttgcaagaattcttcgtgtactctggatataaatcctttatcagatatatgatttgcaagtattttcttcccactactaatttttaaatgtataattaaaaaaaattcttaatttcttaaaacacacgcaacccctgctgaaaaacaaattagatgctagttcctaatacaattcttgattgacaagtaagcctatttaaggtgctatcatgctggaagatataatttgaattattgtttgtattattattggaaataagcataattccacacagaactgtaaaaatagacttcagggcttttactgcatggtccccatgcatttcaaaaagtcctggaactatgaaatagcttcacgaacgaacaggaataaaaaaagcatcactataaccacagggtagttagttcctgtcatctccttgaaagcattacattatttttaattattcaaattgctttaaattcattaagtaacaggcatgagtataggcatagtgggagataaactataaaacacaatccctgtcatcaaggggctataatctagttgaagacaaaaggattatacatgcacaaagagacacccaactatgcagagcagttaatgacaaataccagatggtgctatccataaactccgctaagacgttcagaaaatgatgaaatttcatgaggttttccctggattttcagaatactcacattaaatgtcttacatttatacataaagtcagcaaaggcaaaccatgcatgggcatacaatctataaatgattcaacaaacatattttggcacctagtctacgccaggccctacgttagggtcataaatataaatctgatcatgctcgtctttcagctttcctgctgtgctctccattgttcagaaaaaactatcctttgtgctttaacacttgataatcaccaaatccttccacttgtgagtcagtgaaatagtaaagcagataaaaaaggattctttgattgaattcataattaacagagaatcaaaagggtgactctcaaactactttattcggttgctgtaaaaactaactactttaaaaatctaagtgcttagaaatgggttggggcataaataatgctcaagaaattaatatcaaataaatgctactatcattagcattaagtgctaactgaatttttgagaagtaaattaatttctgtagttgtatctcaaaagatgaagtaagatagcctctaatatattcttgtacaaagaagacttatgccaacgtgtgctaattaaaattactgtacttattgagaataaaagggcaagaccaatattccaatgctttgacgctgtccttccctccctcccagcccagattgtgttgggagatgaacttacagttctgcagtgtactggggaatgtggtctgggattttggtgagcttttgattggagcaatctactgtggtcccttcacagcggcacttttcagggcaagccaaatctgcaaagcagtccccacttaattttgatcgataatcttctgtacctagtgaggattcaagccagaagagaagatactaagtctaaaggttagaatatttgttaatttgtaggaagaaaaaagtcaaataactatagattatgcagcagggagacaacttggggaattttggtcaatggatgtcaggagagggttaaaacacgggcttggaatttgctggaaaaaagagtaaccagattcacaggacaggcaaacattaatagagttgagcttttcacagctgtactttctgctgatccagttatgagccattctagcctatttgaaagctaatcacacaatggctattaattgttaaaaagtttatttttttctctgagtcaagaatttaaaatgtatccagtcataaacgtattcctatatatcattttaaattagggctttcaaggtaaatagatgtactcaggtttttaaattttctatggtcttttattattctctccctctcacataatctccagaaatgcttaaaaagccctcttttttcattttgattttataaaaagagacaagtaaatcctgatttaagcctcagcagcttgtcatgctgtagaaagctgcgtgacgttccatggtgcttgacggaaccatgttttactcatacctggcaaccacatggttagatcaagcacaacagaaaatctcgccacataatcactacaccatccactaggccaagggtaagactgagaggaaagatgaagggaagcaggagaaaagctacagacgttctggaaatgtaatactgtttacatgacatgcattcttcccgcagaatgtttatgaccattgtaagagtattactaccgaaggtttcctggaaacacaaagaaggggctatactgaaaggtgcctccaccgttcctcagaactgtagaatggaaataacagctttcgggaacaacatccaggaagaggttgaaagtgagccacaaggacaacagagaagctcaaaagatctgtggtttcttctcgaaaaaaaggcgcaaaagactgagactagaagaaggtacatcaggattgaaaagggaggacattatgtttaagatcagacacttttacttacagcccaaatggtgaatccctgcaaaagtaaaggtcaccgagaggaaagaaagacagagtaatcccaattaagattaacgtatgtatgtaactctaactaaggtctcttccatcgttccttactgtggcaatttttcggaaatggtatggtatgacaagaattgtcatgctttgtaaacttttatcataattttttggagcacagtggtcttataggaaatgcaatggcatacaagatgcatagcacaaattaagttcttgtcgattcctttaaaaagatcaactctttgcaagatagattttcttttgagttatcactgtaatgtctagaatgccatatagaatggtggtaggcaagtaaatatgtaaaattaagtgacaaattaatcacgaagatcttcaaggactgtcactagcacatttggattaatccttaggttgtggattacatgcttcttaatgatttttccaacttataaataatgtcactcagtggaaatggaatcagaatctcataaaaagtttgcaaagctgaatctgagcttccttacatttggcaactaatgccacgacatttattgaggatctgtcgtattgtggtttaagctttcgttttaaaagtgaaatgagggggtactgggaataaagtctaaaacacagctctaccaggtactttacatttaaaataatctggcttcagtgcaatgacgataatgcttattttatggtgctctttaggtaggctcaaattttaattaaaatctggaaaaataaatgcaaaaggaggcccaaagaattcttctgagttccgatttctataattattgctttaaataatgcaaattgaattaatggaaattgacaattaagccatgatattggatataaaacatattttcctaaacctattttagctgctgtcagagggaaaaaccgtatcagaatatatgaaaacaacctgacttttgttctttatttggtgaattgaaaatattaatttctaaattattaataaaatatatttaagtgtaatagattgaatgatttggtaacaattaatattaactgctgtaatttggggatttaagtaaaactgatgtttgatccaacaggtattctgttgtttagaatatggccttttatgggtaagtaacagctatcagatgactttctaccttataattgggtaaaaataatgaattttaaacattgccaatgaaggccaatcaactgttcttttcaacatgctacttcttaagcagccagtgtaatatataaaatagtattgatcattcaagctcaaaataagtaataaacaaaatctgttaaatgcatcaaattattcagattataatttaacaatggcaagcaacacatatctccttaaatagagaccaaacccagagttcttctcaagaaaataagtatgactttgtacactgagactgtagaaatatctttttatatatagctgttaaaatatattatagtctagaatatacccaggagatggtaaatgtgaccaatcaattactaacatatatttttacataatggcttaaaacaaacaagtcaagaggcattttacacaattggcaggcaaagaaaaaataagtaaacaaagatatttcaaagagctagttctagaatcatcagccttgatcacgttcagattgcagtagtaaaacatttcaactgcttccctaagaaacatttcattcgtctgcctaaattattaaaggcactagtgcccaagaacttccagtgctttcaggatggatgtcaatattgtttttgtggagttatactgtgacttcagatatgcaggaatgtcaagtcacaaacaataaagtacaattgcatgtaaatgagcaggaaactgctctttttgtatgaaaagtaaaatagagtaagcaaagtaaagtaaaaataaggaacacattttaaatatagaaaactatataaaaaaaggaaatctcatgattgaaaacacaattctgtgtgtttgtaactgatttcatggagaactagctctttgaccacagaaaggtcgctgtctttaaaaccagctcaataagctatattttaaaaacaggttgaaagatcagatatacaacgtaaggagagaaaatgatttaagtagaaagccataggttcaaacattttagctactgtgaggaatttcagataatgtgccaaagtgagagagagagagaaaaaaaggtgggagtttaataatatataggattaacatcagaagctgcatgcaaaggtcaggttttcaggaaacagctacaaatgatctatgcagaaggaaatctatctacagagtaccgactgtactttcaagagcatgcatatcaacgttttagctctattttacaaggtgaggaaagggtgtctgcagttagtcctactaccgagcaaaacctacctggaatgaaatactgttctttagctaaataaaaaaagagaaaaaaaatagaagatgcacctgaatgtcagcaagcagagatatgagttatattagattaagaatggactaaagttactatagataattaagtggaaatgtatattcacagcagtggctgaagtataataatgtacagtgactagtaaatgcatctaggaccagggacgataaacagctttgctttgatattagctttttagtatgaattaactgccgaatgtgaaatacacctggaatagttaggtagcatactacccaaaacattagattgtctgctatcataagaaaatagaaaagattagaccaaagcaaacactaaatttcaatgaagtaagctttctatttaatatggatacaatgcgtctatatattcagctttttataaatcaatgcaatggtcccaaatgttaaaagatggccttttggaaaaaatgtatcctcacagtcctattcaaaataagaaaacgccaaatgaggaaagggcattcggtgtgagaagcaagggatcaggagctctccccctacttctgatctgagcaaatcacacaagcaaggctcagctcactttctgaaggaatgaaaacgtgattgattaccttaagtttctcaatggagaacgatacaacaaacatgagactcaacagacttaaaagcattccgagttagctaagaggcccctgttaagttcaaaccctgggaagacagtatgaagtatccaggcatctttttttcttggctagtagcctatttcgtttgctagatatagtgttaaaaatgttacttattggactgctataggaaaagtgtctacagttccctttatttttttctttatgggcagaagaaaaagaaatatgattctacaatgtttggcaattcagccgaaagccagctgtctctaggtctcacgtaaccactgtttttggtaacacacgggaaatgtcatacgaagtaagaaattacctgaacaacgaaatttcttgcttttgatctgtccgattcttttgtttgccagacgccgggggctggtgcagcgggcaccactggtctcaatggggttggtatggagataatccgccagccacttgagatggcagtcacaaataaaggggttctgggccaaatgcctttcagaaacacacagaacacttttatacatgacttgcaatgaactcaactctcaaattctgagtgaaaacaagagtcaccaaatttgctctaaatcatatctacatacatagtttgaatggcccggagaggtgaaaaggtccccttggcgatggtctgaagcttgttgtcatataaggagagaaggttcaagttgtgtagatcctgaaaagcatctacccgaaggcagtttatcttgttggcattcaataatctgtttgattaaatagttgtagaattaaagtgtagcatctcattaacccaccttcaagattctgtccttcttgagaaaactcaatcaacaaacacatttcttttaacctcaacactaacattttaactgtaataatttagatatcacaggctgaagatccggggttatatcagataaagcaaaggtcatacagtctaatgaatgcctaaatctagtggtacttaggtatttatttaataaaaattattaaacatgttctgtggaagatgtggcggtagggacaatggtgggtgagatctagcctctgctgtcaatgaggacaccataaaaaaatgccataaaacattagtttcttgagctgctctgtgaaaaagttcactctactttcaaaatagcagccaggatgagccttctaacatagatcagagcatgccactcttctctcaaaaccacgcaataactcccaattttctctgaggaaaacttaagtcctgacaacagccttattgcccaatagggtcttcagcacccccttctgaacactgcaacctccaagttctctcctttgggctgtttcagctccagccacacaggcctcctcaccagactcttttcttctctgcttgggacgttcttcacccagttgtctgcctggctaactattttgcttttccgagtctgctcaaatcttcccttactcattcaactgatcctgccactctctctaatactgtcagactgtctttgcctactcctgacctctagcactctcaactcctttactatgatctattttttctattttcttaaacaaatatttctttctgttatatatgatttacttactatgttattgctgtcatttgcatgcctcctcccccaaggatataagatccagacagcagggatatttgtctattttgttccctgatttttcccaggtgtctagcacatacttggtgttcaataaatatttattgttgaatgaatactttatagtcctcttggagagtgacacggtacattaccatattaaaggccctagtcctgcattataaatactagttgaacttggcttaacacaacatctcacaaactcactttttctcatatatcctatcaatattcgatatcaatattctgtggagctgtggtttacagatcaccttttggcaaaagtcattctcataggttacacgtgatcgtatctgagcaaaatttttattcatggtggactcacctttgggaatatatttgccctgcttgccactttcctcagccttctggactttcaagccctcacagaaggctcaccttttccagaacgtgacttccacccaactaaagtattccttcctccaggttccaaaggaagttattcagtgctgcttcatctcatcacctagttcatggagtccacttgtttgcccaaagacagtttagcaccctgagggctgagaacttttttcatacttctttttctctatcactatttacttcagaactttaacaaatatttagtagcttgaaaaatatgctatgctgcttgggcttgggcttgtaccccttgttatctaacacactgaaaaatgttttcccttttgaccacaagaatctctaactttaactaacataggctatttccatttcacttgcttgcttttttaggtactccatgcacacgcaaagctgtgacctccttgtggtgattctccttgctgcactcatttttatccccctgcaggagctgaggttttggctttctctgtagtctacataatattttcttaaaagcttagaggcttggtttgaggtatggactgattaatcccattcctccccactctaggcccaacataagtcacactgactctgttccctaatttgtcagctaactggagaaaggagtcagagagtagaacattaaggacaaggaaaaggtgggaagcctggaagaaaactaaagaaggtgctgttctgagtattttgtccctactttaaatttatgtggtacaaaaattagggggaaatagtattggacactaatttcttttgttccttccatgtacctacttcttctccctaatatctcatcagttcaagcagatctaagatgctcaaccactttctcagctaggtgtaaagaacaatcgtgtcacttgagccctggcaggcttaagaacgggccttaagctagaggtaaaacataaggctgagagataaaggtggttttttaagtaagatttatctacatacagatcctatggtgtattaacatgtttgctacattaactactattaagcgtgtgtggaaagagaaagaaggtactattttaagtgttgatactaggcaggacagcattagcaaaagagattggaagtaaagagaaaggtgaatactgctagggaaatgtggaagaaggacagaaaagtaataacaaagaagcaatacctggctatagcatcagctatacctatgtgtgtagaatcattctattaatgattaaaaacagtgtttgctaactctattacaaggattaaaaaataatttgaggggccgggccagtggcgtagggtaagttcatgcactctgctttggcggcccagggtttgcagtttgggatcctggcacagacttacacactgctcatcaagccacgctgttggcagcatcccatatacaaagtagaggaagattcgtacagatgttagttcagagaccatcttcctcaagcaaaaggaggaagattggcaacagatgttagctcagggccgatcttcctcacacacacacgcacaaataataataattcgaaagccaaataaagtcattaggtcataaagatcagtatttatcatgactcattggtctgtcataaaatcagtttattgggttacgcagcattaaggagaaaaagagagagaatgaaacagaatggagagtactacagatagtaaggtgaaatattgttttgttaacaatttgatacatttgtgtgtgtgtgcatgtgaactgggttgtaatataaaatgcgtctttgagctatgatgaaaaactttaaaatatggataataggatgtgattatgaacataagtttataaattaaggaaaaggtctatatttgggaagtttgtgggattaggaatacattttaccaaatgagtcacataaatccaatgccaggaaatgaatacatctgaaagagggaataacattctaaactgaagaaatttaaaggagattgactgtgagctagtggagagaagaaattatatcatattcatctttgtatccacagcagctagggcaacgtgtgtcccaaaggaggtacatttgtgtttggtgttaggtgtttgaacagaatttgatgatccaacacttccaaccttagtattagcatatttttttcaatctctttttcatataagcattcattaagacatctggggcaagtcttattcttataaatacgtatggtaaatacctctttcaagacaaatgagtaatagctattgtctgagcagagcggtgtttaaagacacaatccagggaatttacagataattctctcactaaagattagtttgagtgttgcgcaatgtctagcctactgctcaccatctttgtgtcggcggtgtcattgggcaaggattgcacaagctttaaatgatagggctgccaggatgcacacattcttgattgtgcggagagaaacagtttcggggcaacttcaaagtgttttcaagcaaatatccatcattagtgttagctccactagactaatcttctccctttcattaaactatgtccttttgggttgaatttttctgaagcctacatgaaaatatgagatggtacactaactaaaatataatatttaagttcaacagactagaaacaatcaatacttacagtagctgtaaggaaaacagtccttcaaataaactttttgggagttctgtgattttattcccatagaggacactgaaaaaacatgatttaaatgaaaaaatcagacaccaaagcagcatgaaaattcatccaacacatatgtattcaggtatacaggaagttagtaagcactccatacgttataaagctacagctaggtaaaaaaacttcaatttgcaactgttttttcctgattatagatcagatgtatgcttatggtagaaagtttggaaaacataaaaaaacaaagaaagatgaacacaattcataactttattgccctttcatagaaatgcccactgttaaattgtcatgtttttctacacacatacacacatacaggcatacatagacacacacggtttatatgtaatgagtgcacactatatacaacaaaggagaacactaaatgtgaaacccattgcccattataggcatgagttttaggcttatcatactggtaaatagtaaaaggaatccacataagggtaagatttttattttaagcttataacgtgtacgcttgagcaatgtaaaatctatgaagacagtgatcactaatattaacacaagagattttttaaagtgtgtgttccccaaataaataagaacaggaattcatctgcatatacccacctctcatcagccactaagtgtagccactaagtgcaaggaccatgacttgatctcctcagtacacccggtacctagcataggttttggcatacactgacgttctaacactggactgatgagtgagcattgttttatgagtgaaataaagaaacatattagcagaggaacaaattaaggaataagttaacaaaaaagaatgaaatgaaaggacttcaatagcaaatgaatggaaatggttgacacatcatgtcgattctcaacaatagatgtgcaataaggcctatcaatttttagcccccaaaagtagtggactgcaattatgtgtaggaaaagatagaaattacatttttatggggacaagttggcaatgtatatcaagagtcataaagatgtctgtataaattttaacttactaagtagtttcactcttaggactttaagaaaataatcagacacaaagacaacattttatgtacaaaatgttaatcatgcataatttataacagtgaaaaattaaacacaaataaaacatctccaaatcccaaaagagggtattgattaaatacatatttcacattgataaaaatcacatttggaagaatatatagtgacaagaaagtgttcatgatataacattaagtttttaaaaagcctagtacaaactagtatactatagcatgattttaactttgcttagaaaaataaatacatatacacatagaaaaaaagtggaaaatctctggatggcaggcaatttggcatccagaggtgatttgaatttgcatctttatatacagtttaaattttttataatctctacaataagcttattccttttgaaaatcagaaaaatatttttttggaaaagaaataaatggatgtcataatatataaaggaaaaagctgaaacgagaatctaaataactaatatgtttggcagcagtacataatttctgtttgaaaaggaggaaaataacaatacaagagagatgagtaagagtgagggaaaagctgttcccttttaagatgtcattgtgaggtgggatatattacaaaatatgaggaaaattctcaagggaataattaaagctgagtgctatcttgtgtaaagagacattccatttgtatagattccaattacataacataacataaaaattcttttgtgtagaatatagattttttttaaaaaaggttaatcaattagagaagaaacaattttaaaaaaatcaaagaacaaaagagagacttctatattgtcagggtcaaggaggtaaaggaattaagaaaggtaaagaaaggataaatatatgttttaaggtcaagaataagacaatagatggctttaggaaacacaaaggagcagatcaagatgacaccaattcaggatattcaattcaataccattcaattcattcattcaacaatagatactgtgcacttactatgtgccaggaactttgctaggttctaaggatggtggccaattaaactgaaaccaaccattatttgttgaatcttcatcatttgcccatgtgccaggcactgataagactccgatgaataaggtatggcttcaaagagccatccaaaagagcaattttgaatactgaagaagtttcatattttgaacccattgagacttaaataggaaacaggacacatataaattgtgggggagccacataagaattaaggggcaagtaatttagtaggttgtttatttgggacttttgcttcaagggttgactcaaatagcataaaagaaaggatagctaggagacgtgtcacattgacattacaaaactattgttttacaacaaatgactctgttttaagatcatatttttaaaaatacatgttttattgttaatgagacaatttgggtacatggggctaaaaaggaggagatcacaaaaggaggcaaaaaaaaatctgtgtaggcattattgggtacacggactatcaatcataaaaatattatgaagaaatactaaatatgacaggaatgagatttctttacaaaaaggtatagcaatactagggctgggtacagttttcttatacacagcaagatcaaaatggtagcacagaaaatgagttaaaaatatcaataatccaacgaccaggacagagaagttggatgacagtcaagaaaacagggccaaaatctataaaaacaagggaaaggcatatcatcacttaaagacataaagtataaagaaggccagggaggatttgtgctacattcatatgaggggaaaaaaagcaaaaagaaattaaaaaatgatagtgaattcacctgaaaataaaataaatacatggggatccgggtaatatcatccaaataccaagaacgacaaattgagtggcttctctacagtttttttatatatgacttatactcatcatactatgtacagtatacaataatgctgatagagaattcttttatagtccttgggaacaatagggacaccttaaggcagctcttgtaactgctattagaaggaaggctgagaatgctaaactcagtttcacccttatgagtttcaactttatgacagtaggatacagcaactgttggggccctgtctttgaatcctcctgaccttgttgaaagctggcagaagacagaactcctactgaagagaaaaaatattcaaaacggaaacttataagatggctatcatgaaaaaggttctatgggcagactttaatatacaaataaatgtcagagagccatgtttataagttaaaaaaaatgcacacttgagaattaaaacactaagcaattttaaatagagtacagaaaagagaaagcagaggatgctacaatttcattttcattgaaagctggtggtaaaatgcaagatactgggcaggagacaacatcagtccaagaaaagactggaggagatgtaaacacagcaatcaggtctttcaccgcggacttctgtggaatttgggagctggttagtgaagaagggaaatttgataagttgaactacaatagtttgcaagggtttaatgaaaaaatggagaaaggaaaactggctatatacttgagtacagttccagaaagacactggtattaaactatcaggtataaggcaaacttgcacaagtaaaaacttgatctaaaaaaagaagtgttgcctacttgcatggctcctgcagttacctacactctctcaagtcacttcactcctttctggaagattgaaactcctggctcactttggcgatctgtaacgtgacacttttccagcgaacctgtctttcaccaaatttcatccttctctcctcatagtcctagaccttgttgttaccagtaagttcaacctcttcattatctcaatttcaagcacctgctcccctccagtcatactgatcttttcttgctctttcttgaaacactcagcatactccagcctcagggccttagtatttagctgttctctctgttttgaatgctctttctccatatatctgtacagctcactcctacaggtcgaatcttcaggtctttaacctatatcaccttcttcggagtcctttgttgatcatcctatttaagatttcagctctcccctctcctgacattccttattttccttcatagccgctttcatcatcagatatactatatcttttgcccagcaactggtttgtcattggtcacctccaagagggagggattttgtgttttgttcactcacgcattttcagagtcatgaatagagcctgatacacaacaagggccccataaatttctgttcaatgtacgattgtggttaaatgaagaaaagggctattgtaaatctgtgtagttacatattttatggaggagataaataaattaatctttggaaggtcaattcaaaatatgaacccaaagaggaaaatgacagcagttttgacatatagactttctctaacatagcatagctattagagtctctcctagtctagctgttttataatgttatatggcattatgtgggcattccacttctggaaaacagttcctactcttttaggtactgctactttttgaaccagaaattcctcagtgagttaacactgatcaaaatgcagttccacaagaaaacataatgcttttatacagccttccaaaagaacggtgtacatgagaactcggatcacgaagattaagatcataattcagcaagcatgttcttttatgtgttgtcatttcttttactatttgctattattttatttatatagattattacataataatttataatattaactatagctgtatatttattaataaatataatgtaatttattgtgataaatgataaattataacatgctctatttatttactttagtttatttctttttatcatttactgtaattctcacagccacgaaagtgttaattaagtttattaaggcaatagagtttaatagtaaactgtgcaagaaaggagatgtagataagaattctccaaccatttctctacattttgacatttaatggttatttttgagatgcagatacttgaaggacccgtaattggtatattgacttgacttttgttgtgtccttttgcatggctggcaagttgtctatgtttactttggacagtattactgtcccggatggtagacacagttctttatggacaacttgggtgacttaactgagatttacattgaacttgcttattttagaatctgctggcccaccctgacagcaatacctgactgtcctctacactgtctgccaacaactgttctcctcgtctcggactttctctagtaaaaacaaaagaaaacagaacaaaaaacaaccacaagtgaacctaagcagatactgcaggtgaagtggtagttttccattttctttcttcaaagaaaactatagttttctgagcacatcagcatagtaacctgaacatccatgcacccaggtgagtactcccatcttctctccttgctacgagtgagcataaactgttatataaatcccaggtattcatctgggtctcccacatgtgtattctggaattctcactgactaccagtgacttctgaaattcgtaggagttctgcagtaatttacatcagtaagaacccttctctaagtgtcaactcttaaaaaaaaatgccagtctccattttcaaactttaaaatttgaaataaaggttaccttatttggtggacatctgaagatgtttacaagtttgaaggaataacagcctgtatccatttattttagaaccactttaatttacatagctatctccctgaaagtccttttgacatgaaaacagctgtcacacgttcttctctttgttctttgagaggctaaagctgcttctttcagggaaatcttaaaatgatgaagcagggaggtggggcctctcactgatcatcttcagttgttctcagagagactttgcccagcatcattctaaagaggaccgatacctatccagagatagtggctattggtttaaggattataaatacaagattgaccaagggactccaaaataaacactttccctttctttcagaaacaaaaaattgtcaaaaaggggctcttactcttgctttctaatagcaaaattagcaaatccaaaaatatatacccctaaaaattggctgattttagtgacatgtagcagtcttccataaagacaatggaattaagtaatgattaataacaattaatacgattactaattcataatagaaacctaaagaagtatttttcttaaatccaaattttaaaaatatagccattatttgttgtgtgttctactttcctccagtgatgtggtcaatacttacagtgaattcagagagcgtagtccttggaaagcatctggtgctaattcagagatctgattattgctcaggtcgctaagattagaaacggggttaggttaaattaaatataatgtcagggatatttactgcaagagaaagctatttattgcctttacatgtcagttttgcacctatcaatacacgtataaaatttgcaacataaaacatctgaagcatcctaaatttaaaacaaaatcacacacttgctattttcttaaattattttaaagacgtcatgtttaatttttgaaaatagaacatctaagaagttgactgcactctatattgaccacatacattcatactagtgtgaatcaatatgttaaattacagagaactttaaaatattacatagtttagcttttaacattacaatgttatagaactagcaatcagatagtcacatcacctaatatttaagctgtcaaacacttaaatattcatacttaaatgggtgtctttgcatggtcatgacctgtataatttaaaaaatgacatatattccagaatattattcactcacattcttctaagctttttatatggtgagaaagctccaggagggatgattttgattgagttctgttccaaacgtctgcaatgaaaaaattcaatttttaaatggaaatgtgagcttttagttatgtgtaattcaagcccaggattcacatcaagaagcaaagttgatgctcttcatgagtgatattttcttttttctcaaacatgactacgaaattaattgtgctatgccctaaatgtggagcaagattgggaataaaaataaggcaattataaaaacaataaaaatatcttaatttttagccataataagtccatttatatttaagtctggtctttgtataaaaggaaaaacacctgtaagaaagtaacttaggagtctattttaataacttctatatcagtgagagaagtatgtatgtggtaacactaaatagatgtataatatcttttagagataaatacaattcttccacaaaggaaattatcgtttaatattaaattttacaaagcttttatttcctttacagaaagcatcttataggttaaaaaaattattatagtcaaaaaattaattttgaagcttcttttggggcaaaaccttaaattctaaatccaaaagtgctgtaggtactttcagtataactgtctgaactctgtccattcattatgtaaatatttcatgtgaaaaccactgtagcaaagtgcaaacacaactgaagtatttttatgatgcactaaaatcagagttgaaaataacccactgacattatctactctatggttctgccctcagagaaacataagattttactcaccaagttatgaaagacacaaaggagtagatttcactaagtgccttggtaaatattttagtccatcaaaaaatgttgcctctcagcctcatttctatccatatacaaacatcctaataaacatatcccatccccttcctctcttctgttctgctctgcatcccagtaagctgactctcatgaaccatgtatcccaggctcacttgccagctggcttttgtgaaacttggccaatgagaggcatggatggggaagatgggagaaggggagaagccaggttattctcccctcctctgtctcaggggatgtcctcagcagtggtgtcatctccttcctaatttcagctcctgctgggggccacctcctgactttgtataacaccaccttctacaaaggtctttgtagccctggagatggtagcagcatttagatctttgtgtcaccttcgacaactttttaactcattcctcatataaatgtctcactgaaatacctggcatgagctccattttcctgcctggacgtgaaaaaatatccacatatacaatatttatattagtatagatatatatttatatataaatataaggacaatatatatgtattgactataagtgtgtcgtatacactggttcatttttattgagagttagcaatactgtaacatatacatattaccaacatttaatgaacatcaaatcaaaaccaacaaaatattcctaaaaggttaaggcaaattgcctaaattttggtatttttcgattccaaagactctctcacagtaccctggtttcttcaacagtctcagggctcaccctctgaattcctgatctctatatgcaatgagtttcctcaatcttcattgctcttggactcactgtagcatttgatattgctaacaatccttcttcccttggattgacactatatgcccttggttctcactctacttttctctttctcaatttatggcttttctttctaatcctctaaattgagctattcctcaggtttctgtcctttcctttctcccacaaaggtgaaagtccttctctatgacctgtaacgtcagtcatgattctcctccttgaaaagtcagaaattattttgttcacattaaagacaaatttaagtttacttacaaaatatgtaaggaagaaaattaaaatcacccataatgattactattcagatcagtgaattttaccttacttgagtttttctgcgtgcagatttattttatataattgaagtcttgtatataattttgagtcatatcctttacagcaaatatcatacgtttccctatatcattaaaaattttggacgacattatttttaatgtcttcataactaccaattatcaaaatagatcatatttctttactcacttcctatttttagccatttaggttagtaataattttacactattattaataatattgcttagttcttttaagacgactggagcaaggtctccttttgaagccttactttattttctctatatgctcaggggcattctctttacaactcctctgctcttatctcactatagtctagtcatttttcacatatttctcctcaatagggtttttagttcctaaggggcagatttaacccagaagatttgtccagaagacaagaaataaatcgtatgaagaaaatatggatgtggcatccggattatttatcaaggtcttaagaaagagaacttttttcaaaagctctaaatatagcaaagggcattaaaatcatttcactcttacatttttgattagagctgtatgaattgatgtttcagacacacattttttttttgccctgatccgttcttttagttagatcttaagaagtttaaaatgtaatcaatgaaaatatagtgaaaaaaagctataggcgaaatactattgactagaagacttcaaatctaggccaatgaaacatcacttcatttgttaagaatttgctcaaaataacataatgctgtgataagaaaaaataaaaattcttagtgactagtagatttcctttaatggtaatgcaaaactaattcatatagtacttttcataaataccatttcaggttcttgaaaataaagaaaccagtaattattcattcattcattcattcaccctgcaaatatttaacgtgtactctgtgtgaggtagtatcctatatgattggatataaatggcgatccaaagcaaatatgttcataccctcatggaagtttcattgatgtctaattctgcagttatatttccaactaatttgttcactacaagttttttaaaaatgctatattcagcattgagacttttgaaatgtcaaaaatacttactcacaaaagtggccaagctaattatatcatttaatgtaagtgaagaacttctctataaagtttaaaattcatttatcattttaaagtctcggaacctaaaatacttataataatcactaattgttctaatagcattcaaatatattttattttgataatctaatctacgtgcttaatctacagttaatttcattgataagtattcctattaaagcaaacaaaacatgtataaaaaatgaggccatgttttttagaaaatacatgctcaaaaagttataaaacatgaagaattcatgatgacagtgttaagttttatatgtaaaaataataatttaaacataatatagcgagcagtgctgcacctatcgtttgttcattattgcaatgtaccatgacttaattttcacgttgcaaacaatttcatttacaacacatgcaacagaaagctgaacaatgacatgtacaatggatttgcttgcttttctttatttatctatttacttccaaccttgttccaaaaaagtatttgaaacagagcttatatggttatttacattggcttggcagctaattggtttctatggcactgtctcagtagtccattaaggcaaaatataattgcctccttcattcaaagagacagattctcatgcaggaaaatattctaccactgacagatgtcaaacaataaagtttaagatgttccaaaatgtctgttttctcatctttagtggacaaactaatagactaatgtgtacttactgtaaacttttaggtctctaggataaagggtttttatttttcatcatgagaattttataatatatttgacaaactaaaaaaaacacacatctcaaatagtgtccttcctcctacaaaaaagaggggaaaatatttaaactagattataaaaaataaggaagaaaaatattacagttttcaggtgaaagttcaaaaaagaagcaaatgaaatgtacattttctatctttgttatcctctaatcttctactttaatagcacagaatgtgctgaattttatagagtgcaaatttgaatccattgttccatgaaaaatctaattaaaaacattccagggttacaaaaacagatagtgtaatggttaggatatatttgcatgctgtggataaaatccaccatagttaagagccttccaaatgttaatctttcaaagcaagaaaatttaatattttgaatttcaaaataaaaatagatttagaaaactgaataaggaagggagaaaattctataaaccacatactataaagaagactttttcataaaaagaacctttttctccacagcatgtatgtgaacaattccaaaacatttcatcactacatatacaggcatacctcagagatcctgcaggttcaattccagaccactgcaacaaagcgaacatctcaacaaactgggtgacacgaatgttttggtttcccagtgcatagagaatttatgtttacactatactgtactttactaagtatgaaatagcatatgtctaagaaaacaatgcacataccttaatttaaaaatactttattgctaaaaagtgcaaatgctgttggaaaaatggcaccaataacttgctcaacgcagtcttacaacaaacctttaatttgtcaaaaacaccattatctgtgaagcgcaataaactgaagtgcaataaacaaggtatgcccgtgtgtatatataactgacagagcgacagaagaactatggtctgaaaccagaaatattattaaggaagaatgcaaaaagacaatgcctgaagtaaaaagacaggaaaaattgagatggatggcataagaaacactaaaaatcgttaagaacaggcgagaagcaaaagcaaaaggtgacaaaagtagggttagaatcctgcacacaatttttcagagactgtcatgtagagatacagagaatcactatgatggccaacgtaaagagacagaagaaaacaaagaaggaagaacaagaggcctcttccagaagattcaagaaatcaaagggaaatttaaacctagattatttaatgctgaacaaccaacagggaagcatactatgtgatcaaaagttaaagggaagacggaaacaggtactgaagatctatacagaagagacaaaaggataacagaagccttggaggaagattcctatgagggagaagccataattctagaaagtgaagtgaaagctgccctgaaagtactgggaagaaataagtcaccagggatagatgggatctcagttttaagccacagagacagaatctgtcaaaatcctaagaatatggtagcaaatacggaaaacaaaacaatggcctacacactggaaacactcaatatatatcccagtccccaagaaaggagatgtcaaggagtgcagtaactacaggactattgctttaatttcccatgcaagtaaagtgatgttcaagatgctgcaacaaaggcttttatcctatacggagcaagaagtgcctgatgtccaagctggattttgaaaagggagaggtacatgaaattggaattgctattattccttagctcttggagtgctccgaagaatttcagaagaaggttagtctatggtttacaatctacagtaaagcctttgactgcacagatcatgaaaagctatgggatgcactgaaagaaatgggcatgtctcagcacttgattgtcctgatgcgtaacctgtattatggacaagaagccactgtcaggacagaatatgggaagacagaatgggttcctataagtaaacatgtcagataaggatgcattttatctctcttacttatttaatctgtacacagaacacatgaaaaactgggctagactcagatgaaggaggagtgaaaattggtggaagaagtatcaacaatctaagacatgaaggtaacaccatctaactggcagaaggcagcaatgacttgaaatgacttctgatgaaagtaaaagaagaaagtgtcaaagcaggactgcaattgaacatcaagaagacaaagatgatgactacagaagatctacacaactcaaacgtagacaatgaagatactgaaattttaaagatttggtttaccttggttcagacatcaatttaaatggagactgcagccaagaaatcaagacaagactgagacttggaagggcagcaataaaagaagtaggaaagatcatcaaccataaggaagtgttattagagaccaaggccaggattatccacacgttgtattcccaattactatatatgggtgtgaaagctggagagcgaagaaagctgacaggaaaaaaattgattcatttgaaatatgatgttggaggagagctctaaaaataccctggacttccagaaagatgaacaagtgggtccttagagtaaatcaagcttgaactgcggcaagaggcaaaaataataaaactgaggctctcctaatttgggcacatcatgagaagggagcactgttcctaaatgacaataatgctgggaaaagtagaaggcagcaggaaaagaggaagaccaagtatgagatggactgactccataaaggaagccatagatataagcctacaggagctgggtagggctgttgaggacaggacattgtagacatcactcattcacagggccgccaggaattgacttgatggcatgtaacgacaaatatgtatatttgtatacatataaatataaaatctccaagccatttgctgttaccacttcatcaaaagcagaaggaaattttagctagttcaatgagataagaaaatggagacagttttctaattgctccaatcagaaaattcaaaagtatgtttagccaataaagacctctcctccccattctcatgcatttttttctcttgctctctaattactgctgtttaaaaaatcacacatctttacacttttagtgttccgaaagaatgaactgtggccaatatatgtcactttctggtgtgtatttcaaagattacagaaaatggaatattatcaataaatctttctgctttaacacagtagaaccttagaacatggaaatgatatgcaagtacaactgggctctgtggcatataaaatactctctatggttaccattgagaagatcttgcctcaggagagtatacaacccagtgtaattcgacaatttaaaagctccaactagttctgaagacatctataagatattagccagcattcgtctattttaaatgacactttcagctcacaagcattcaattctcatacactactctcaatatttttcaaattaagttattttgacaaactatacaaaataacatcaacatgccaaagctgaaatagctctccctaagagctatttatgttttgtatatgtgtatacataaagatcacaatgtgtagtttcgtgattaaaagtacgagctctatatagacttccattaaattctggatctgccactgattagctctgtcaaccctgtgaaagctagtttgcttctctgtgtctcagtttctctttctgaaaaatgagaaagataaaacttactataaatgttttggtaaaaattatgagatgtaaaggaaatatatggtatgttttttctagcacaaaaatgctgaaggaataaaaatatggggatatatgtgtatatatgtaataacacataatatatagcattacataataaaatgtctacagcatattagtcacacaaacacaaacagattatataaaggaataaatttgatacatgatctgatgtctagtgtgaaataaatatatatggttccaaaatatttttaaatgaattagcagtacagagttgcagataactcagtaactgtgtgttaaacacatacacacatacatcattcacatgaaggctgaaaaacatatgtacggttgcaatttccgtgatcaacatgattaaaacatagcatcttctcaaattgggaaactgtctcagaaactcaaaaaagtttttacaacaccagtaaagtataagtttggatcgcttgtatctgtaacatacagcccagatgctgattatacatggcaataaaactgacagctctttgcattctccccatctgcttttaacgtaaatggcaaaaacagctgccagagaatagaacatagatttaatggaggaaggagggtttgtggaatgactctagcttctgaatcttggattgtttagtgtagccagtgtctcctcatcataggtaacatcagtccagaatctgacaggaaggtagcagcaatattcctttgatgttagtgattctcttgcctattacataataactctaaagtaagtactttatatttccggaatgttacttctaactttagcagtgaatgcatgccagcgaaatccttcctatgtccccacataaaatgacccaagatattttagactaggatattatttcttttatgtaattgcagtctccagaactttgtaagtttaataaatatcttcagcagctgagtgaatattggcctctagagggatatactttgcatatagctagcatttttgcattaggactgtgtccatagtaattaattatcagccttccctgccttaggatgacttgttcctgaaaactgtccatttccctaatcttattttgtttcttgtgatgtcattctacagtacattccctgagtgtaaattcaattgatgtcttcatagtagaagtaactctttttccatttggttttaagcatttaaaacaaaacaaaaattgtgtgggtgtgtgtgttcctattgacttcatatttcagtcaatgaccttctgaatcagtgttaaaaatttcaagcatgtattcgtagggacacatattcaaatgcaaagatacacacaatcacatggtttagatttaggggggaaaatgggctgaggcacatggctcaccaattttaggcggccagagtatagatttatagtgtcaataacaataagttttcatacataattttctttggcaacccaagaaagaaaatcatttagaagttctgctgctttgtttttcattaataattaaaaccttttggacactcactatgagtcaggcactgacctaagttccctatttggtaataattttagttttaaaaaaattatgcaaattatctttatacattacttgtttaacagtattactcaatgagtagatagctatttgcattctttcctacccctgtactgtgttactgtccaagctatctattatttttttcctaaagtttagataacagtgtgctcttaatagaatttgaattatataaattttcaacatcatctttccagttgattatataaccataaatctataacttaattcctaaaaaacaaatgacaattttatttgtctgataatgaatgatactttgactatgccccagctgtcttcatttttatgctgaagtccatgtaggtcttattttacatctgatgagactccattttttttttcctgtagaagactttagggaaatactacaatagcactaggtcattccttggaataaccttccatctttatctgctgctaagttggccttcatcgtgccttatagagactgatgctctcacattctcagtgggctcctttcctccaaaccactctccactccacattagagagatttttctaactaacaaatctaatcacgctaccaccttgctcaaaatttttcctggtaccctcttgtcatcaggcaggtgactcttcaagactaggcttctgcttttttcttctagcaatcaaaaactcttacaatttctcaaagatacattacctctcattttctgggactgtgcatatgctctttcctctgtctagaaagttccaaatttctctgcctgcaaaacacatcctcatacctgaagatgccttgattctcccaggcaaaccaaggtattcatctctgtgttctctgtgcatatgtatttattacttatcatctacttttcaaagtttctgtttatgtaaagcttcaattctctgcactgtaaacattttgaaggttggaactgtgtccctccatctacaatgacaaatgcagagtaggcactcaaaaatatttgttgactatgtagtatatgtaaaataatagtattttccacatgtccttcttctgttataataatatgcatcaggctccttggactttttaaaagaaaccagttggaatttcttacttgccttaccattttaagctccactccagtcaccttaatatttcttttttaccaatttatttataattttaccatacttagtttcacttcttaactaatattacaaaagtttgattcagtcttctatatttttctcttaagaaagccattatatctttctgcctaaatgatcatacaactcaacaagaaaaaagcatataaagtatgtacgtacacatataacatatatattacatatacaagttttttgtgaagttaggtacaaagaagacataagtaaggaaaccgtaaattgaaaaggcaaacaaaagaatgtgagaaaatatttgcaaaccatatatctgatgagttaatatccaaaatatacaaagaaccaatacaactcaatagcagaaaagcaaataatccagttaaaaaataggcaaaggacctgaatagacatttttccaagaagacatacaaatggccaacaagtacaggaaaaggtgctcaacgtcactaacccttcagggaaatgcaaatcaaaaccacaatgagatatcacctcacacctgttagaatggctactatcaaaaagacaggagataactagtgttggtgaggctatggagaaaagggaaaacttgtgcactgttggtgggaatgtaaattggtgcagccactatgataaacaatatagtggttccttaaaaaatgaaaaataccactaccatatgatccagcaatctcactcctgagcatatatctaaggaaaggaaatcagtatcttgaagagatgtttgaagccccatgttcattgcagctttattcacaaaagccaagatatggaaacaacttaaatgtcctttgacagatgaacctggaggatattatgctaagtgaaataagccagacaaagacaaatactgtacactattatttgcacatgcaatctaaaagaaaaaagccaatttcatagaaatagaaaatagaatggtggtggttgccaggggcaagtgggagggagaaatggatagatgaggatcaaatggtacacactttcagttataagaagaataaattctgagatctaatgtacagcatgatgactgtagttaataacacagtattgtatacttgaaagttgctgagagtagacattaagcgttctcactacacacacaaaaagagtaaactatgtgaggtgatggatgtgttaattatcttgatcttgacaatcattccacaatgtatatgtatatcaaatcatcacatgatgcactttaaatatatacaattgtattggtcaattattcctcaataaaattgaaaaaaaaagaaataagttgcgggaaataggtacaaacaaatttctgatcatgaacacatactcttaacaaaaatggattctctgcatggaatggatatactttttaagatgattattctactatttcattcaatagcaattaaagattgttcaagatatgcatgtaaaattgagaattctgtcaaaatatagatgaaaacactccaatgttattagtgaactcaataatggcctgtggaactacaagtacagtttaatctatgaatttatttcacataatttatctcacactattttgctgtgaaattgtcaaagttgctgtagagattacactaagcgtggctactgataactaaaaattaatgtgagatgtttgttctgatggaacacaatagagatgtttgttttctataccgaataatgaatttgttctctgcaattcgtaggaagctaaattattttgtctttttctgagctctttacttatgatgaaatcatgatatgaaaacatccgaaaaaataatccaaaaacatgagaaaatacaattgcatcaaaaaacttcttttacatcaaacaactttctgactacttatctcataaaataaaatataccgtaagaaaggaatgatgctattttgtttttctaatcataactatgttaggacacaatcagagctgaattcttgacttatgtatatactttgatgatgcctttattttgatcccaggattgtttatttaatgacatttccagacaaaattatattttttgatcgaagaaaaaactagttcttttatgagatttggggaatacatacctaatttctgctattgtaagaatctcaaaagcaaacatgagaacatatttctaattctctacattagagtagagatgtagagtcatagccccctatttgaaaccaggtttatgtaaaaactaacaaaattattttctacattacaaaaaatttaaaaggtttctgctaacctttagagactatatagtttcctaaattctgtttcagtaggtctgaagtaaatttctttatcataaaaaaggtgttaactttgacacaagatgtttttaaaaatgtattatgtcatatatatttctccaagacatcaaagaggagtgtgttatcatattaggtagcctgaaaagcacaaaattgtaaaattatcaaatgcaaaggtaaaagccatgcgacaggctagctaattctgtaggtgtatctgaagtaacaagaatgtcatgattgtgggaaactgcaaaatgctaacaagtgctccagctgttaacaagtgctctagtaaaactacaaatattagtagaattgctcaccttttcactttgataacattttcttaactctgcctattttctattgcatatcataacccttaagtggcatacatcgctaaatttttaaatactttcctaatgaaacaaatactttcataagaaaaacaatttcactttgaaattagcatactttttatttaaggcaaactcagattatggactatttatttctttcataccaaattacattaaaatggtatcatttgctttatttagatattttatttacatttatttatgttgtctaaaagtcaaggtaatctacaacattctataaaaattagttcaaatgttgcatttatttttaaaattgattttcaaagtttggcataattaaaagaaaatcacccaattacatggcatgatagctgttctattagctgagacattgctgagtgaatgataaataatcagaaaatcatgctggatttcacgagtacctgtaactgtcttaataacctggtgtagaatggactacttaaaaacatgttgattaaatctaacttacatatccctacctatagaaagtcagatgtctttgaaataggtggattccaaatttgggaagttttatttaatagaattaaagattcagaattttggaagaggcaaatgcagacatggtatgctaaaagagttaaacatatacaggaagagaatttgtctaaaaagaaatggagggaaaagacggatttttaaagtaatattcactaacataaatgcaggttgtaatcagatatagcattcagaatcattcttactttcacttctctataattatgcatgcaagtgacccagaggaaacaaaaggagcaaaagtacttccaaacctcctatccaccctccctcactgtgaatcacttcgaaagagccctctttattactggcagtataagagtagttgtccagtgaatttactcaacaaaatgagtttccttcctattttacctatttgaataacatgtccaaaaaaactatcacttttgagactttgcaatccatcttagaaaatattgaaacagtactcagaagacctgccctgagaaccttgctaccatcctttcccttcccataatttgaacctttccgtgagcttctctcagacaaataaaagaaagaattgcacagcctccagcttttgagccctgaaaaaggcaaacaaaaggaagggtaggaggacatagaacaaacaagacaccctaaattgttacagcctatgctcttactaaccattctccatgatttatggaatttctgtataatggtctaaacagaaaatctataactagattgaagagaactaaatgtctactttatagcaatccatcacatcatattcaaaattttatacctcaaaacatgaattaagaaattaattttgaggatctgatatggagagaatcaattggctattaataactttgttgccgtgggccagatcatgtataacttgccacaggcaattcatttgtatgaaaacaaggtttcaaccagcagagtccaaagcaggaatgtgccaggcagattccaggggagcaagagcttctttcttttagacctaattttaccttacattacacattctatttcgccccccatctttattagtccatattcctttgtcacgttttctttttttcactatgaagaatggagacctagaggccttcagatttgtgtcccagacccccccaaacctgtccccaacattatccttctccccactcacactacactaagtgtcgaggccgaaacggtgaagaaagtggacatggtcctgccctcgttaagctcgcagtctaataggatagtttgacattaaccaaaatatcaaattaaactggataaggtgtatgcagacaaaatccagggagatatgagaacatttaacagagaataggaaagatgacattatagcagttgtagatataaagtactatgaaagagctctcagttttgcaaacaccttgataacttaaggccttgtctttctctatgttccttaaaggtcctctatatatgtaagtttcttaaagtttctgttgttctatttttctaaatatcagtcagctctttctgcgatttttttcaattatcacttccatgataatccaacaaacacatgccctgtctacctttcttttgcagctggatcaaggaaggaatatggacttcagagccaaacaaatctaagaccgaagccagtttagctacttcataattgaagatcttttgttttgcaagatttcttaatttttttgagtttaatttttataaaacagcaaagtaaaactgtcagtctttgagagatttgagttaaacgtctctaagcttcactacaggggaaatatgatcttagaaaaatgtctaagacttattgtaggaagactgaattaattaatatatttaaagaaggagagtatctattagatattagcttggttggcctagaacagagaaaaacgagctctcagacacatggagcctgtgtggggaacaggggaatttaacaaatgaattttcagtattttagcccattccattaaacagtctattcattaacttttctcttcttgattttatgctctaaaaggatctttttttccttctacagggagagaatggtctgcttctccaggttttatttttttaatcttgtttaatacaggtccatcctttcagaaacaaaatctgctctaaatgcttacttttaaataatccattcaatcaataaacatttatctcatatttgtcaaatgccccacgtgccaggtactagagtcattgctgggtgttcagtggtgatcagaacagaaccagttcctgccttcatagagcttctacgtcagaagggaagacagatgttaaacaaacacacaaatatataaataaatataaaacgtaattattaggtgcagtcaaaatcagattcctagcctacaaatggaaggacagatcctaggccaggataatatcatcaggataatgaggcctctcatagaaagcatcaacctttatctagcatatgcctctgcattagctttcctatttcaattaatttcgataactactcccattcaaagatcaaggagaagatcaaatgatacaatgtgggtgtagcatacaatactgcacatagtagataaatgttagtctttctattcctcctttgccaaattattctaattcagactttaaaataatattccctttctatatcttaacaaataattatttgagcaaacaccagaagtgcaaaattatatttgtaagcagaaaaaagaaaagaatgagtcaagtttttctgcctagattttatgtaattgatcactcctacaaatagcacatacatgttttctttttgttaaaaattatatcatgaaacagttgcaggaataaagacatatcacacagaaggaaatcaacctaacagtattgaatgaaatgtctgataacttgcagtaaagaaatgctaatgacaatttcagataaaatccagattaaagaattgtttgaaaaatatggagggagtttataatttcagtacatcatgtattagaaagcaagaatctataaaaataaaaaaagatgatgtcatccttatctccacattttatgaatcttactgatgttctttaataaaaaaataaaagagtaataaaagaaattagttgcttagctagtaagatgccatgaatggcaatgggggtatttcgttgagttgaagatcaatataatttattaccagatgctctactcataaatctgataatgtaataatcagagaagtaaaactcacctcaagcgtcacatatgttttcatccttatttataaatttaatttattgcagctttaccaaatagactagaaccttctcaacataggcaaaaccaatgggacatattatctagtataacttttatgttaataaatcacactattatacaaaatctatagagcatacaaaatagaagaaaagctcttttataaaaagtaaaataaactacagaagataaaccattttaaatgtctcatcttactttttcttttagatctacaacttattcttctccttttgtcaaccacaacagcgtttccttctcctctcttatgatcaggattcaatggatgccctcctgtgtccaggacagtcttgctcccacatatatcttatctaactctaacattctcatctctctctaaacccattctttctttctttctaatgactgcaggtttctgcatcttaaaataaatccaagtctgtcctttatagtgacaattgtctttttcaaaaaatcctctctcagccaaacttttcaaactgctccatatttgctctctccaataatcatcatgtactccccttcttaacactctgaaaaatatcactctatcctgaatcctccatggtcaaattccgagacctgttctcagacctctgcttggttcatcaggccgagtattcgactctgcagatcatttttcctagaagttccttcctcccttacctattatggccctctgctgcttttatttagttctcttggtttctattctcttgctctccttttcaggggccattcgatggctttaactgtcaacttttttttaaaataatattaattactccaaaatctttgcctcaagtccttgtcttgctccaaattattacagtctgcattattttagtacctctaaatatctcattggtagttcagttttcacaaatcaccaccatcttccttccacgttttggtcttgcttctcagcttcttatatacaatattataaccaccatctccctatccctcatacttgaaattttggcatcatccttggttcatttttctccattattctctcatctcatcaaatgccaaatcccattaattctgctcctatattagctatcatatctgcttctacatcatcattcgttttgctacttactagctcttgctctcatgacatctcccctcgatcaacataatagcctcctaagaggcctcatggatgggattctctcctttggccaaacccctggcacatagctgtcagattaattcttcttgaagacttagatgaaaactcctgtgttcaaatgtatttcaaataaagactctgatccttatgccatcaaagcccttcatgaattggctccaaactccctttccaattttattttcctgaacttcctcaggtatcaaacaccagtcaaaccgagttcctgttcagtagtatcttgtatttccattcttattgcctacactcatgatgttcattaattttgaaagctcttttctcatctctgcatttccattcactagctatctctcaaggcccacctcatgtgttacctcctagatgaaagcttcaacaatcgaggtatcatttattgaataattactacatctcaagcacataatgctctacatgtgttaattatttcatttcaaactgacaacaacccttagtttccataatgagacagtcccatagaggataagtatcttgcccatggtctcacagatagtaaatagtaggtagatctgcggttctaactaaagcttgctgtctctagttaaccactgtaacttgcccttcactttacaccctctgtaataaatactttgagctttatttgttcctctcttataaggttttctactttgtacctcttttcagcttttaattttcatgccaaattttctagtcacttgacagacggtctctagagaattcatctgcctccacatagagtttatggaataaatgcttgtgcctggatagatgactatactactcccctatttgaaaacttaccacatctttctgctatttagttcatcatatatgacatcttctgatgaaaatgaaagtctttcaataatttgtggctttaaaattatgtggagatatctttttgggggcattattttacatgatgcctcaacatacacctagtaatctaattcggttcaattgtgcaatctctaaaagatgatgcttactgccacctctgccctttgctcctgatgtttctctcttttgcaatgtcacctgtctcttctcaaaccatatgttcttcttcattcaaggttcagctaaaaaatactgacaaatgtcttctgtgggcaaagtagtgttccaccaaataaaaatttgatgagaataatattattatgtacatacatttatccatgtctgtgtcaaagctctacagattctagactccctaaagaggaccatgtcttacactgcagagctctaagcacacttttttttggtgaggaagatttgacttgagctaacaacatctgttgtcaatcctcctgtttttttcttttttttgcttaaggaagacaggccctgagctaatatctgagccagtcttcctctactttgtatgtgggtcactgccacagcatggctgatgagtgaagtaggtctgcacctgggatccaaactcgtgaacctgggctaccaaagtggagcaagcagaattttaaccactaggccacggggcaggctcccaagcactcttttaaggatacatttgatactttaaaatgttagtgggtcttgtgaattaaggttattctcatataagtaaattagagcagttaattggaaaaaaaagtttttgaaaataatagttttgtacctactgtgtagccctgtcacaagaaattggtcctattttattatttcaaccaaaaaatatccaaaactatttacttaatgaaaaataagaattggcctcaaaaacaataatatgataggctgggtggttaagaggtgctttcttagataatggatattcaggtaaagattctccctaatgcttacttgccaagatggtactagcagtccatttcacatcgtatgtgaccttgttttatccacatgacttctgcttggcaaggacataaaaatgcacacagtggctgcatacaaaataagtaggaaatagtctgtcaagagaatttaacttttgatggaggtagtcagtcattggctcaaatcggttaaaatgttcactaatttaaaaatatattttgactttgtaatattatctgtttttatactttgtggtagaccatacaacagttcaaacaaaaagtgaaactgcattttaaaatgtgagctcttgaagagggagaacatcatcaagttagattgtttctgtgattcattcctccagctccatcctgcttttgttttccccagctccaagttagaaacggacaagagcagctctacagacccaaacagtcagacgaggtataaccacccttatttttcctaaccagcccaataacacctcctccagggaagagaaggtactacttatccttaaaatgcattcctttgaattctacctgtgctaaaaacaatcctagccattcaacaaggtatttaattagaccgagtaagggtcaatacaattctgaaagggacatttgtctaagctaatcgaccagatttgcctttgataaactcagaatctcctaaggaaagtcatggttagggtccctgggaggtggaggggtaggagggaatttcagggcacatacatttctgtgatggtctcgggcagattcgtggggatctcagtgagacctttcccacgacagtctacgatattgttgctacaggtacaagcagctgggcagtgcaaaacgctgcaagaaggagccataaatgactggtgacctgaaacagaaacaaacagcaattatgttcttcctcctgaatttcatcactgtgaaacacgcatgcttagctcagaaatacatttaacagaatgtacagaaatacattaacagaatagttaacagaaatacatttctctaaacatctgatcataaaatgatcccacatttctagaatatattttaggaagcatgcatttacacttttgggtcaatacccagatgaagtaaatgagattttttaaactaattataaaaatagtaatttttaagataattgcgcaaaaggctaaattcagattcaaaactagaatttcattcaaaactattccaagttccaaaaaaagtagcaatgtcagactaatctatatttcatttctaataagcttagacacagctttgtctttattgaacttaagtagcttaacctactttaccacaaaaaaagaaagaacagtaactttccatcttggtagacataactgttgattctaaataagtaatcacgcaccaacaaatgtggggaagaatcagattatgctaagtttggtgtcttattttgatggggtcaaaattaccactttctttaaagttataataatttgcttcatgtcattctgtaattgtcaatctatattattctcttttggcttttcatggcttaaaattttagcctaagtagttacctgcaggtatatatttttattactctgtatttggcaacaaaactattttgaaatgagattttactgttcaaatgatgaacaacagaatgccagttgtgttgtaccaattgggcatctgcaaacccttggttactggagcagggacagccctctctgacccgcaggggaagggcccaggggtggtgacgcgccgggaagaggctgcaggctagttactaacccagtccctctcaacaagctctcaaactttacaaaaatagtctcagtctaaaaaagaaacgtgaacttgccttcttcctcatctagaaaacaggaaggaaaaagtgaagaaagaaaaaagtggttagtaacgaactgttagtcattccattatttaatttttaaaaaagcaatcagacctattgagaacatcccatgacattataagaaaattttgtttgggttataaaaagtgtgagaaaacacacaaaaaagtcgaaaagataacaataaaataagatcctatactaggacgtctcctccttcctcctttaacaaactgttaactatttacgatgcattacatatattttaaaaatttgttttactgtattttgagcagaaacttctgaagcagaaccagcctgatatttataaaataaattatatgttaatatagatcaatattaacatataattttataaataaataaacatatatatatacacacacagatcttcttcaacttatgatggggttgcgttctgataaactcgtcataaattgaaaagattataatttgaaaatgcatttaatacacctaacctaccacacatcatagcttagcctagcttccccaaaacgtgctcagaacacttacactagcctacacttgggcaaaacatctaacacaaagcccattttatagtgaagtgttgaatatctcatgtgatttattgagtaccgtactgaaagtgaaaaacagaacggtcatacggtatagaatagttgtaagtgtatccgttgtttactctcacgaacgtgtggctgactgggagctgccacttgctgccattacccagtatcacaagacactgtcatattgcatattgctaccctaggaaaagatgaaaattcaaaatttgaagtattggtccctattgaacgcataccatttttgcatgatcgtgatgtctaaaagtcctaagttgaaccatcattaagtcagggactttctgtatatgtgtatatatatatatatatatatatatacatggactggaaatgagactgcctagattgtgatccttggactcaactatataaccttggacaaggttacttagcatcttcttttctcaacaatttaatctctaatatagagataatattacatttctctatagttgttatgaggaagctgaaatgaggtaaataataggtgaaatacttattttgcacagctcatgttgtatttttgttactaaagctagtcactgatctgttttaagtagaattgaagcattagtatatatgtatacacaaaaagtactttgtcactctgcaaccatagttgatgtacttttttgaatttcacagcagggatccaggattagttaatcatttttcaattgttaacataaaagtagctataatttattatttacagggaaaataatgagtagcaaatagaactataatctaagaattttctatatttctcctggagtgaaaaatggaaaatttttcataataatttaggtacaagtaatcagtaattgcaaaccatgtgcaaatgtcttagaacatgttattatcatcactaaaaagaggatttccatagaatgattagtgcataatagcacacgttagtgagcaacagtgaaacctttaaagcatgcactcttcacagttctgttacttaaaagcatacaagaatatgacaatgtaaaggtacttcttcccttaccgctgcagacaaattctcgtttttgaacctcagctacattgtggcccctcaggtgggatgggcccatacactgagtatagaggcccacacgaggcctttggcgcagccagtcagagagccaggctaggtggcagtcacaatacaggttgttcgagtggagtcgactaaatgaggggaaagaggtttaaagcacgaaaacagaaaatagttatttcaaaacttggaggattcattaatcataatatataacgatatttcttaacgtagaagtagataaaggttagcaagtaccaacctacttacttttctaaaaattaaaccagtttataaccacagaagcaagtctctcttcatttatctctgagctgagcaaagctacagaagcttgaacatgatcataaaaatcttttgtccacgttcatttaaaagagtggagagaaacaactaagtccaaggcaaactgctctgcagtccgacatactgaccgccaattgtaaatggaaaatatcataagttgaaaatgcatttaatacatctaacctacagaacatcatagcttagcctcgcctaccttcaacgtgctcagagcacttttcagtggggtatggtggaggaggggggaaagggaaggttaatgaaagttgagactcccagttttaattatcagtctcgctattactagcctctgtagaaactgcttgcaaaacctttttagcaggtcattttcattttttgctgaacaagacagaatagtaattcaatataaaacacttctttcacgtgcctcttctgatttccttcttttcgtttaacatcagaaaaggggactagctgcttttggctcttggggacctattctcaaagagcaggaactgaaattaaaagacacaaatggcttggagcgaaggaatgaagtgagtccctctctgttggcagggatccacaccagagaatggatcccttccaagtggcaaatagcatttttccattaataaaatatcagacaaatgtatccactaaattaggtaaatgatttcaaactggcttttatgttttctcaaactaaagaaaaggacatccaaagctataaatcaaagcatcattcccagaattgtctatgacacggtaatgccacttcagtcctttttagctgatgtgctcaattctaacccaataacagtaatggatattaaaacatggaactcagtccagaaagataattggaccataaaaatggaatttttaagtagcaatgataatatagaataatgaaacaaccaaagcaagggaatttaaagttagataactatttaacattctccttgaacctgtagatagggaacagactgtcttgcatcaaaactagacagcatgccacagaacaaaaagctacattttgggaaagctgggtgacctctggctcagtttgcttagaagtcagagtgggattctttggaagccacgtagcacattacacatcattgttctctaaatatttccatctaaatcaagtacattacaaccattcaattaggtgcgcatgaatttgaaaagagaaaatagcataaaaatttaaaaacctgattaataagacaaattgtagtggatttctacaagaaaataagacaatatcaaaaatgtagatggatgtttttacagtctcagtggctttagttttgcaaagattgaaagcttgatcaatttgtttttaaaaaattagctagagttaatgagaaaccattttcatcaaacatagtttgagtgaactgggctcttagtttggctagattagtctcaatctgatagccccaagaaaataaaatttggttatatttgcatacttttagaattattttattttggtaaatcatattccaaggaaattccaaggaaattataataatatgttattgcacacagagctacattttagtgagaaaaatgacattaatattggttttacctaaatcattaaaatgctggcaattcaactgatttttttattaaagagtgaaaataaatgtaatatgtttccagttataagctattgtaaaatgaaaaatattttgaaaatccaatcaaaatacatttaccccacttaaaaacatattttttcaaaaacttcaatgcttaggttatgtttcccaccatttctcacatgttgtatataatatattttttaggtcaaggtgattctgaaatgcagtttaaatgagacttatctctgaaaatgctttaactaaatacccccactctagactttaaggcttaattattctctaagagataaaaatagctgtagcaaatgctttattagaggaccatttttcttcacctaaaatattttaatgttcatctgtaagccctgaaaagatatttttaaatataaatgctgacacaatcttaattatagaagcactagagggtgatgctgtaattttacgttacaaagaatgttggagagccggtttggctttattaggtctgcttgctgtacagtaataaaatcataaagatttaccatttatcatttctgacagccaatcaaggagtcttccatttcttaatgaaatgtgacctccacaatagctcaaagtaaatgtctcccctcccaaacttctcataacgcatatcatttaaaagaaagctttcaagttttcagaataatagtttgtttgcccaaatatcatatctggaacttttaaaaaaatgttttctttgtctaccctataatgaactagcagtctattctttgcttactaacagtagtacttaaggcgatctttcagttgattatgttgacctttatatatgtgactacttacaaagtcctaagtttaggcatatggttgaaactcgccacagaaagtctggtaatgttgttattgttgagagtgctgtagaataaaaaaagttaggaattttagatctgaaggtttattgatcattcaatatattaatacagagaaaacgtttcatgattatgtttaggcaggacaagtacctggtagagatggcatagagaatgcactacattatacacaagatgttaaataaattttatactttaacactttactaggcattcatcaaatatttattacaaatttatggctttagccatagtatctttgactatttacacggtgctttatgtaccacgtgcatgcatgcatgcttacttatgatattggttaaggaatgaacatgagacagtcacagttagaaaaatcaagaagttacatttccttggaggggcacgatgtggaattagtgtccatgaggaaatgaacatatttgaattctccaactgaaatctaataatagtagcacagaatcagttctgccaggtcctggaagagagtcctctaacgttctttactgtggatgtcagccgctgctgaaagttgagtaataaggctgatatctatatttggtactggcattgggtggggatgaagtgacatgctgtagcagtatattgaaagcttaatatttctaacaggttttagttgcagccgcataccctgccctttgtttagtgctgtgtggtcatgatcatggtttcttgaaggtaaagtcaggaagatgggtggtcaagggagatatagtaaaaataagtataattcttgccaaattcaaattttcttactgttcctcctaccacaagcattgttagttgtattattattactatttctactacttctactatttattcattcatcgaatatttccggaatggctcttatttttatggcaacatggaacattaataaatcaagcataaaatctgtcccaaaatagcatatagtccaactggggaggtgaattacatggattacaaaaacttggagttaataagattaagaagagagattttgttttttcctcccttcagagaagtctggttgtgatgagaaagcaaggagacagtggtcccaggagtgtgtgagtacagtttggagatggaaaatgactccagcatctagaagatacagtggggtggtgactcaacagcacaaagctgaaggcagcaagaaagatgggatcaatggcccaggtggatgaagtttgatactggagaagggtttgaattagaggttgcaaattcacttgactccagaggccatgcagggaagacacatgagagaagcagactgcatgtaaagaaacacaatggggaagagagatggagaagagcagacagacagctgggaccagggggactatggcaatctagcaacgatattctctgttgtagcagctaatattcagctctaatggactgttgctgtgctgtaatggaaggctgccaaacactgtgattttctcaagagaagctagaaatggaaaattttagatcagtcctcctaatttgctaatttttcttttcattttttttggtgaggaagattgcccctgagcaaatatctgttgccaatcttcctctattttgtatgtgaggtgtcaccacagcatagcttcatgaatggcatgtaggtctgtactcgggatccaaacctgtgaatctgaggccaccaatgcagagtgcacgaacttaaccactacccgaccaggctggccccctaagttttaaatactgacagctaactcaaatatttcaaacagtccatgggccaaatctatttgggctaagcaagatatatttgccattaggccagctggggactgcggttgtcaatggcgggatatggggtgttcagggtttgagggattaggttaaacttttcagtaaagtagggaacaacagctacagatatagaacacccattgactctctttactatccagttttgaaatgtattgaatgacataagaactaatccaagtgatttggattaagtcacatagaaaaaaaccccactttatggaggacctataaagcattgaattggttgactcatattatccagaagcttgtagcattttcccatactcaagtgatttttttcaaatgccattaaaatataccctgatgtttgaactaaaaggttttacttctcaaagggatttgctttcaaatgatcccttttcccactctcaaaatttatgctgactttatatggctaaaatcttcagagtacatagcatattgaaatatgactttggggataacattttttttaaagtaattcacactcagcagacatgcattaattttgaaccatagtttcttacaattccacataaaagagagttttcattgaatgctgaagccagtggctatcaatttgaaaacttttctcaaaatgtgaattcacataatgcaattaaagaaataaattatgttggcatttttattcggtattgatgctggcaaagcaatactgatactgatacctggtaactgaacaatatgtggaaccaatgaaatgaaattattttaaaactaacaataaatgtaaatgttaattaggtatgatgtcatgtatatgctatggtcgcaatcaactcctatttatatattgtacttctttatttgtgaacattttttcctacatgaaagtctatttctatgttcaacctcaagattttctctttgtggtgagaacatattcttatacaaaagatattttggggtgtaaatattaaacgttagtcttggcaatcaggtaggccctctcgaacttagatcttgatttattctttcttattgccttagcgtcaagcgtaggatttatcagagagtctgatatttaatggatatgaatccctatgtttcaattcaattaaattatgcccattctatggaaaaggaaaaagaaaacataagactagcaactcaaggaatatatttcatttctcaatctagcatccaaagcaaaagaaaacactgatctaggtttaattaccaatgttatttttgagatgatatcttcatattaagaaaataaacagtctaaatcctactaaccagaattccacaataaggccatgaatatataagagataaactgcctccttgctttcacctgccttgacttttccttcttgaactttattcactttctctaccttaatatatatcctaatctaacaaattttcataatggcccaggctgatcactcccatcttctccagtttggcctcagtgtattcacacattcacaaatggttcatggaattaaaatttaaaacaatctgaagcattgggaatctgaaatttaaggtgaagtgcaaattaattaatccttcattatttccacataagaagaagatatacactaaagagtaagggatggcaaaaatatgcaaaactgacaacttgcattctggaacgtttctgagggttactctaaaaaaaaaagcccccgactaaatgtttataataggcaaacttctggtttacctgacaagaaatttgggcttaagaaattccagttttttcagtactttatccaattttgccttaaattctttatcaattctttctcgacaggttgtatgaatgatgaggattttaaaaattaacatacattaaaagaccgtctgcttgactttatgaaattctaatatcaagtatttaaaagattttgaaagaaacttacattttcttatattatgtgctaattttaattacttttttagacaacagactctgaccgttatgcatctctttgagacatatataagctcctaaaaagagtttccaatattttggattttgattttaatttgatgaactataaaacctttatcactctttggtgtgttttatggtagtgggtcttgctaaagtcacattttagatattctgataacatgacaagcaaagtttgaggtgattgtgtttccatgaacttactgcttctaaaaacaaagatagtttagaacatataagcaaatgaatagttcttatatttgtgggtaaagggttttcaaggcatagcacagtgcttggcacacagcaggtactcaatgtatagacagagtactctttctgtctctctacagagggaaagagttcacaatatattatatatatgaatgattccatgtctagtaagtatttaagctcttttattttagtaacaaactactttgtgggattttaattcatccaaaatattcatcaaattttccataaaaagattggcatcattcatattcctagttaggagcaatgactaagtaacaaaatatttttggcttgatcagctctattcaattaaataacacctgtggtagtctcttcctagacaaagtttagtgacattgactacggttttgacatcagactactatctgaaatcacagttatccggactctgaaatagcatccaagtgcttcgtacattaaaaatggctctggaacacaattgaaaaagtggccttataactacaaagtgtatgataagcactttgaatgtttttcctatagaaaaggacagttatccacagaaacaaagtatctcttttgtggttggagaacagtatatattcttacaacacaatttgtctcaatcaactcattcttaagtaagtctttaaaaataattaataacttagaagcacatgacacagctagaaattctattcatttactcgcaactaaaaccaaaacaatatagaaaataatgctaacataagccattctagttgacacattaaacatttttcagaattacattctgctcctcaaattcaatttacaaagcaatagagtcttttttcaggaggatttcatgattcctggataacttttaacacatagattaaatattcaaaacttcttcataatttaattcaattttggatttctgaataattgagtcagggatgaattacggcatagaaaaatattttattttggggagaaatttgcaagtataccgaaaaagctagagatgtgaatctttggaaaaagattccagaagagtagaggtggcttaaaccgttttagtaactcttgttttcactaaaattattttcaatataattaacaatttcattaaaattattttactatttcaaaggtctgtagagattactcacttgcctctaaccaattttgtcagccatatctatccagcaaggaaagacagaggatgccaattataattcaaatctgtgtgttgtgctttacaaagtcagtaacgaagactttgaaagggacctaatgggtggtatattaatattagaaagtagatttcaaataatcttacaaagatgatattgtctagttaaaaatgacattttaaaatgagaaaacgtctttacattgcatagcaaccacaaaatataccaatatatcagctaccaacgtttattttttgttgtaatttttcctatacaactgatgttgtcttaatacttagcaattttgagaattcttacaaatcctgtgagtgagaatattttactataaggagaaacacttaaaagacaataagtgtgaatgtgtgagtgtccttcccagacaattttacctaaacatacagataggatatgcaaggttttgcacaatcacacatttcgactcttctctgtattcaccatgagttatttaaggcatctctttaggagaccattttgacacaaggttttaagcaagtagataagcttccacatcagcactccccagacacaaagctcccgttaaagagtaagagaaataagcagtacttacagcacttccaggtcccggagagccctaaatgccccatcttcaatacagctgatctggttgtaatccagttgcctgttaaatagattaaaagaatatatgtaaaaagctgaagactagcagggttaggtgaaaggaagtctcctgaagggtctacggagtcctggctgcactaactgaaatgctttcacgaacacactcatctccttaagaatgtcacaagccattccggcctcagtgccgccactgaaatctctttttgttctgaactgtctgtgcaaatagcagcccttggaaagctccagtaaataataactgcaccttatattaaatgccataggaatgcaatttcattacatcaagaaaagctatccattaagagctttcagcgtcatcttgctgaaacaatttcattaaggtaaaggactgtaaatcacttaatgtcacatgcacccctcagtgacctaacagaatccatttatcagagaagcccagctgcatgttaatttcactatccttggcaagcaagagcaagactacttttaggttttcttcttttaaaagcagttttccttcgagaactccaaatcaagaaagagaaatgaggtcccatatatttccctgctaatttcaaccaggaatacactttagaaaactagcagttgttctctattaaacttcactattcttataatttgcattgtttatcattatatgcgaattctctatactgtaaatacggcatacttttcagttaaggaacttcccgaattataccactctccagaaaataagtttttaaaactattaagaaattaataaaaaattcttacttctctcaaagatgctaatttcagccccaaaaactaagacacatatatggcagcaacattgttaaaatactacacatatcaatggtaaaaagtttaaaagccgtatcagttccttctacataatacaaaattcaaacagatgaatcttcttctgtagcttaagtactcatttgttaaaattcaaagatgaaaggaaaaggctgctccaaatttggttaagtctgctttttcctgtcacttgtttttggaattaaaatttccttattcatacaaaggaattcatctggttgaaatgaacagctaagtaataaatcctatatcctctctgtcctatcctttctttcttcctatttttacaaagaagcagttgttgtttaaactagtagattgatgcttagcaatattattctgccaataaagaaaaagtattttaatgcttcacttgagatcaaaacaaaatgttcgatgacatagtcaggtgagctgtcagctctgcatgcattgggagggaaggcagacatacaaggtaagactatgatcataatacaaatggatctcctccttgtttcaagttcggaattcactaaaagggctaattcatatttgaggtctgctcttaaagaactgtttaaacatgcccataacatagttgtttctctcacaagactcctgaataaaggtgcaatgatttaatccagtgactttcagaggggcctcttcaaattccttactttagaaattatgtacatagagaatatctcatgaaatatgcatctcatttttaagaaggtctctaggggacacaataacacgggagactacctgatgtcatgcaaatggtacaatttaggacatacaatacacaaaaaggcaaaccctggagaagatacaattttattgcttttataaactaaggttttccccaaataatagctaccagccgtgctactataatagcccaaagcatttccacttattaggaagtaatacagaaatataattttattttctaagaagacttttaaagcctcatgatgtaatacggctgctgaggttccaagaaaacacttacattcttgagcacttttgatttttacggattaaattcatttaacaattaagttaatagcctttttattttaaagtgctaaatatatatctacactactattctctaacctcttgaacaatttatcaaagccatttaaattagtacaatggcatgaagtgttacccttgacatactacaaaagagaaattgtttccagacaaattggcaaaatcttttaatgctatcaaatttgcctaatgcagtctccaggttaatctgtaaaagggtgtgctgtatgtttgcccatatcttattatccttagctgtcaatgtataaatcagtgctgacacagcttcttttaaatcatgcataccatacacaaaggcgaagccccagcatgccagaaagcactcaagcaaatcttgtcctacaaggactgaaaggcagattactttccctataccaccagaagtcgagactctgctggaaactttggtaattttaacccctctttaacattgcttgtgattacaagcttctgattcttaacagtaatctaagtcctttttggtgcaaaaacattaagactaatttgctctcataggaccaaagttttcttaaaagttttccaaatgccatcatatctcagtccacatatcttctaagaatgaagatattttatgaaaagttactcatataaaaggaccatcaaaatcataatgaataattttttcatcaattggtggattttgttatattcaaaggaatgtttatggaaagtgttgtgcccatgtgactgctcatgagaaaatttctctgcacaaacctccatttgtctgcatatggttcaagataaacaatgtcaaaactacgcataagcgtaatttatttcagggtttctggacgatttttctgcaccttgtttctctcaccctgctcacttccttccccactacctttcaaaccctgggtacttctgctttctgtaaacagggaaagatctgttctcagccaagcatttagtgacaggctgaccttgtttagatgtgatttctaattgtgccatgaaattattctgaattaaggaatcaagaggaagagttacttttttccactctccaaaaagtaacattacaaggattcagccagatatagggtaaatttgttgatctctggttgataagcgcaggtacattagggacaactttaggatccttttctggcacaggggtcacttgccagggagaagcaagctagcacttttcttattttctggagagaaagaatggtataaatagtaccatcggctgtttctttcagaccttcagctgatgtatcctagcatagacttttgtaccttctccgccttatttcctacctccactcctcccctctgcttctgctcaaattccaaatcccctctccatctgatccttcactgtcccagtttgtaagtgtatgttttgaagctactgctttattattaatttcatgaaaaagatgatgttaaaaagactagataatcttcaagctatttcacagcattaacattctgattctctttttaggggtaactactcctcttaccatgctctagaataactctagactgctcagtctaatttttactagtgctggtaaatttagtcttagacaatgcagtgtgtctttattcagagacgttactttgtgcctcacatacatagaatttgtaaagctgatctgattttctttaacactaaaaataatgtagcctagtttcagattttgattaattctaggtatgagagacaatacataacactgctaaacataaattttaaaaataggcatattaaatgacaaaagattgaacatttgcttagtttgcatcttgaaatataactggagacattgcattctgttcctcctaagttttatttcagagaattccacttttaattttttgaaatttagataccataccgtgtctgaattaaacatgtaaacctacctgcctgcattaacttcaggtggttttgtccttacctatagaaaactcctattttactgcaggatccaagtaataagatcttattactaatggattttctttttgtaagaattagaaaaccataaaacatgcttaactcagaaatcattaaagatttttcatggttagtattgtctcaaagaaaggtagggtctgttaatgtctcaacaaaattatactatgctccagttttccagttttttaaagctactagaagattatttcatattcatatttctattgtaaaatggaaaacttcaaaaatttatttttgacttaaaatacatcaaagtgattaggatcaatatgagagaataacattttgctgtttggaaagtactctgataaaatatataaatcaaatgggataaaaagataaaatgctgttaaggacacaggcatgatccgttctatttctttccttgtgtatgtaaaattcaagttaatatgagtgcttaaatatataaatcttattctaacaatgattacttaagaagtaatccaagattttttataacatataaagagcctaagaatgatataaattgatcctaaatgaaaaccctagacagaagtttctgcaacaatatagtttacctcagcataaaagcacatcagtgttaacctgaacattagtgaagaaaacaaccaaggtaaggactattctgaggaatgcaaaataatttatgtaatttgagaattaaacccttttgcaatctttcaagcaacattttgtttttctcatcagaataatgaatctcagtatttattggaataatctttggtgtaaagttatacccacttgctaatttattgggaagaggcaaaacagccctaagagagatgggaagaaaaaacggagtaaagacaactaagttgaccttcacattctggtaactctacgtaaattaatcaaaggtggtagaaaatgaaactgacaataataattgcttacatttattgagtgcatagcaaatggcaggatctctagatatgtcatcttattattcctctcagtaacttgaaaaggtacgtattatcatcattccgattttatagatgagaaaatgaggctcacagaagttcaataacttattcaaagtcggagcaaatatttggtgaaaccatgattcaaatttaaatgtacatattgctgaagtccccactcaagacgtaagtggctaaagaaacagatcaggagctatacattctacaaatgggggtttcggctaaatctctgatggccaagtgtcaaggaagaagccagcagatgaagaatgctatataatgtcagagaaagaagagattatcatagactgaagtagtcatgtgtgagggaggaaaaatcttcatccttaaaaaataggtagaatccagaaagtcagaaaatagaagtgggtattccccatcaaggggaaaggttcactaaaaaaaaaacaaaacaaaaacaaaaaacatttgtgagcagaggctctacaacgttcacagtaaatgtttgcaaggaagaggtcattttggcttgagtaaagagcttgtatgcagattcagtggcagagggggctagaagccttggtggaagtcagaatgttaggactagtcagaatatctaaagatatgatggcattcaataaaaatcattgctctctcaggggagagtctatatttcttcagaccttgtagaactatgacagtattctgctatgtccccagggctttgccatagtgcctataacaaagtgtgtgtgtgtgtgtgtgtttaataaactgaatgattttaagccaggtagtgatgggataaaaaacaatgcattacaaaaacaaatctggcctgcaatgttaaagttatataatgagaacacaaactggagatcaaaattcaattagcaacctattgcaattgttcagaggtagcaaaatgtggctgttcagtgttggggaagcaagaaacccaaagacatattctatatcaaggacaagatgccagccacaagaggatcgtgccaattcttactttatacatatgtgaattggattcccaactactcaattcgattttcttgtgttttgtttattttattttggaaagtatttatgaagatatattgcatagactcatttttacataagagaatgacatcactgaaggaaaactgctaagataccctgaagataaggcaaaatgcaaagttggagaggttaatggtagcatacttgtctgtagttgttggagattatcataattcagcgtgcttttagagtgaatgcaaaccaggcaaattacaggaccatggacagttcctatggtgccaatagcagcgctgctgagttcctgatacattttacatttacctgtccggacaaccactggttgtcccttatgtctatagacagcattctggatgttaattggagctctggctctcataatatgaaactcaaattcattcattatccataaaatagagagccatttctacaggtttgtttagaaggttctatgtcccactgaagatctgtggcatttaatctaacactaaggctagtgggtcccttgagtgagaaaccaaactccacttcaaagtctctttagcctcaggcttacagaaaacactctgggaaggagcttggggtgctcaaagttacaatataaatttgatatcaatggattttatttttatgataagtatgtaataatgacaagaaatgtaatgaactaaacatgaaaactacccgattgcagtagacattttgcagttaagacaatttacacaacaaagctaaagaaagtcttgcatttgcatggtaaactacataatgcattcttctcattgttacatattgattctatattatgtgaagaaccctggtttgtttattgttatggaatagcagatgatacaggaaaaaaaaccagtagagagatatataaaaacagagaagtctaaaaaataaaagtaaaacactaagtgtacttagtatagaactgtgtattttccttctatggattttagttgatccatcaataaactaaattgatgatgacagagttcctgaaaaaaaagaaaatttctaaataatataaatagctgtgtaacaacacacagattaactctccctctctgctgtttgacaaatcttcttattcccaataaccactgcaccacaaattgggtgatttctttcctaaaatttcatggacatacatatttgtttcccaaatgatactatgacttagaaagaaccaagctaaatcgtcttgtaacttaaacccttgtccataaatttatgtatgtaaaaaaagaataaatataaatatttaccctaatctattttttttttttaccaacaagcagttttcctggaaaaggagcgtaagactcataacgaatgtaaggttaatgcaattgagatgatgcaagcaaatgagaaagggatgcgtttatttctgaactaaatagtaaaatttgactggaacattgagtacattttgaggacgtattgcaaaatgaaagaagaaaaaaagctagtgtgatttactttgcacaatgtgtctaaaataatgtttgctggaatttaattattttaactattcatgttgaattcactaaaaaaactaatggtaaagtatggtagcttttgcttgtgtgacatgaataacaaccagccatctaattaatttgtaagttcacacatttgtggtttctttcgattaaattccaggataactacaaccagaaatgttttctcatagaaataagagacttgggaaattttttatattcataaaatacatacctatagaataagcttgcaagtcttagcaataaagcaaggtttaattttccattattctcctaaatcagtccatttaaatggaaatatctcatagataactgtaaacaaatcagtggcacaatataacatctttgttcaagatacaatcaggcagcagcaaaggctttattgcatcagtgttaaatatattaaatatatataaaaagtttaaaagaaaagtcatataaacattgattattattttggtgaggcatcagttggtaatgatatggtagcaatactttaattcatacttgattggggagtttaaaaacacagacgcaaaccctatggaaaagagctgccagtgattattacaaatgttataatttagctgatattttaatatgattttgttattctcagacctcaccatctaaaatgtcgggaaaaagaatgtggtttaagttgcagctggagaaaatcaggtaataaaatgtaaaggtttaatccagttaggaaattaatagagataagcaaaaaagttatgggaagtcctccctggagatgtttaagagcaagataaatgtccatctgtctacaacagttttagtgtggcttgcctgaaggaagagaaataagatctgctaatttgcaaaatttccacagcatcaatttcatattgtcaggatgctgccttgagcatatttagccaatccacaagattaaagcaagtgcttccagtggaaatcttctgataactggaatttgctgtgaataaggactgaatgtggtaaagcccataaatgtattacagtgcatcagacttttagaagtgctatcaccttaatgcaactaaagcagacattctgtctagtcttctgttttctttttactctctgaatgatctggaacagtagccatcgtcatgcaggactgtccaaattgtaagtgcatacactaggatgataaacgagacaaagcactgtacctctccttcccacaatgaatatcaataatattaatactgttaatattaatatttatgggcttttattaattactcgaagacttatggctaccagtttaataataatattacttaaaatttacccacagttttaacttattttactagatattgtccttaaccttttttttcctcaagtagattagccctgagctaacatctgacaccaattctcctctttttgcggaggaagattgatcctgtgctaacatctgtgcccatcttactctagcttatacttgggacacctgccacagcatggcttgataagtggtgtataggttcaggccctggatccaaatcagtgaaccctgggccactgaagcagagcaggtgaacttaactgctgtgccactgggcgggcccccttctttaacttttaatgataaatctaaacttcgtataaagctgaatgaaaccagatttttttaaaactcttttttaattacagaaaaatgacttttaactgtaaaattctataaaattgtagctaggatcctgattaatcaaatcaaccaataaatgcattgtggtatttccatgttgctctaatggtctttcacattgttataaggaaggtagtgagaacagacggaataaattgtgagattagtaggaataaattttaacttttcatagccactttaataaattctaacctccccaatctaccctcacctgccatgactcaccaatatgcaatacgaagcaatctccccaaagaatcctttgtattttctttaggaaatctttcctacagcattctctgataacttcaagcaatacttttctctctttcttccttcagcacctatagcacttaatatcttgtttataaatcagggtcttgtgtgtattcatttagtactttctaatatattttctttttccattttgtcgctccatgtctaactgacccatagtagacatggtctatcttatccatgcctaacattaaaaattacttcatcttctctttctcatcttcttagtcttacctttttcagggctaacttctagcagtcgactagtaaatacttgcagaatgaaacaataaactttattacatagcattttactgtttcaaaaggtttttcacatacctcctttccctaataactacaacaaaccgaagcaattattatattcactttatagacgtgaaaatgaaggttcagtgaagtttactgatttgtcatgtctacaagtccagtaaacagcaaaagatcccatgactccagagctaaactcatcccactgtatacataataactgcctttgaatttggtggaaaaatgatgcatgtgggcaaattatttttttaattctcctaaatcaacattgcattcttcatagcacactggttggcatctcgcctttttttatctgaacttttaaaatcacattttttaagaataaatgaagaaaacatcaggaagaatcccaccatgactggtatctcagtcccagatatatccttaatatggaagaagggttacttagagacttggattccctgaatatcttactaagaagattaaaagccacctgttttaaggatttagagataatactatcgtaagattgcaagcggtggtcaactgtagccatcactatccttttaccacaacacataggcaacttgagaagctgctacgtgggggtctttatcttgttctaaccagacgtaagagacagaggcagttgtgaacaactacgtcactgaatttacctgcacacttccccaagccctagctagagaagataaaaagaaagcaaatcaaattgttttaacatgtaaaaaaaaatcataaaaagctagagccaggattttaatggctctacatatttatatctagaatatatattttctatatatatcctgtatttttctgtctttatctgtacttttagaaagtacaaatttaaaacaaaaaccatttacattgaggagaagttgcagaggccaaaacttggagctttataaacagtcgccttctttaataagggaaaacacctgtctcagtttcactactgagaaaagaatgtcggatcccaccatggagaattctgaatagaagttaattcttgaaaaagtgcctgccctgtttattgctagctaagaaatattgaattcctgacagttaatctcagcacaccgagacattttcccctacatttcaagctaatgtaaaagctaaggaaaacatttcatgtcctagcattctcggtcaatcaaaaaccatcattttcaaaggctaatatagcattttaaaatttataaagatatatattgacaatattatgattttcattgagatcttaaatctgatatgtaccatcagagctacgggcacttacaaagaacacttctacgcaagacaccagattaaagatttatcaagggaaaatacagaaacagtcttctttatcttctttctttttttctctttttaaagaaggctatgcatatattctttcataaatatatgaggggaaaagagtgtaagaaaaatattcacacaaagggtaaaatacaattttcttattctcacacttttggcatttaatgaaaatggtgatctaaaagctatatatataaaaaaggctgtagctctacactacaggtatctctaacaagaaaatactgtctactctttccagaaaaaacagtttatattctgcatttccaataaagacagttaacaactgaaaagggagttattgaagtacactgacagtaaaagggaagaaaatacattgtaaatatcttttaatcaaatcatttcattagatttcacaagattaatcacaagctttgaagaatgagtttggtaacaacttcagtttcacgacatcttctaaatgagaatctcttcagatagctagtgaaaacaatttaaaatgtattgttacaagctctcctaagcaagtataaagttatatagagctttcaccattttttctgacaccttatttaatataaatttagctttgaaatggataacttaaaaaaacagtataaattagaaaaaacatacttacaggtttttaatgtcaactgccccacggaaagccttccttggaattgcctgaatttgattttcactgagatcactaaaaataacaacaaaaaaagatcaagttataaaatataatttaaaaattattttaatcaatgtgtttgagaagtgatagggcatttcttaaaaaaagctaaaaaaatactaaaaggatcataattaaatccatagcattagagatcataattaaattcatatcattagatgcgatttctagtataaatatttcatatttctagtataaattaaaaagttagactaaatggtttcttgaagtacttttccagatctttacttttataataaatttcaaaatacaattctcttaaatttaagaatcgattcaattctgtgtaataaaacatttctctaaaacaaatagtaaattattcataacccaatttcaagggattctaaagttttagtacttgatatttctgcaacatccctgaacataacttacaaagtatataaaggaagaagtcccttttaatgtcctcgagaagagtgggcaaaaactgataaaacctgggcagtatgattaagttttcatagcactttaactaatcttgaaaatggaacacagcagtactggcccaacaataaaaccaacagttcctgcatgaaatattaacagcagactgatttaaaaccttctttaaataattctattatgaccataaacacagactgtctatatttgcattttaatttaattgagaaatacattttaatcaaaggaaaacagcactttttgagttggactgagaagtttgtaaaaagcactcatctcaggaaatggatcattatttttccttcagacttcagctgcaattctgtgagctcgcatagtattattagccttaaaaggaggatataaatacacaggcaagaaatgtcactgaaaacagaaaatgctcatctaattttaggtaacaccaccacacagcagaaagttgaagtataaagtaacaatgatggtgctaaaattatcattaaaattctaaaataaacgatgctcacgaagaaagatgaagctactgaccacaggtgcgtagctgatgaaaacagagccattttccaattatgtggaggcgtactggacaaattcatgcacatcctctcccccagtgcttcttatgaccagactttgttgttcacacacttgtggccacgccacagagataactggcagatacagagatttagtgtgtggtcatgacctcattagcaccaagttttaaacaactgagatttgcacttatatctcaatatctgcgatgttcaaacaaacaaaaaaaatgtttactaagcaatttgtaaagaaataaatgttggtctatttaaagagtaaaggtctttagcaaaaaagaaaaaagcccgcatattttatttgaaacaataaatgtacaatatgtgcttatgcaggagttaaggcagccatccatttcctaagcgacgtagccccataactgctttcaatagtttcagtatatccctaagagtaatcaaacttcatttccttaaaaattgcttatttctccagctggtcattgattcagactgatttccttcctttgtttaattacatcgagttaagaatgtttaacagtatatatttaaaagccatgatgttagaaagagtgttcaaaggaggctaccgagcaaggagaaagtaaagagagatactggagaaggaaaaatcagaaaggaatgagaaatgaggaggaaaaaaaagattcaattcaagcaaatttgaatctatagcactcctgaaaaccaattgtgtttttaccgcggtgcccatgaattcaatgttttctcatcgcttattttttttccacttctaagacaaaactgctttaaagactgtgtaggggactaacaatggcagagatgtttacttcagatcgtgcctgcctcccaggctctgcagtcttgccatcccgccagctggggccatttcattcaccacctgcaatctctgctctgctcggtctttaggcatagttcttcctagtcaggttctcaaatggggggatagtgggtgggagaaaagtcaggggatgattttaggtggttcatgagacggcactgaagaacactgaaacacacaatcagaacaccaatccttctgaatttgattttagtctttctgattgccttaggcagaattctagagcatagaagggtttatcccgctgacacttaccaatcttttgtttttattaagagtgagagactatcaggctcagagcgtccttactctcataagattaatggtttatgtgtgtctgccccccaagcagacttttctacggggtctctgctcttgtgcccaacccactctgtcaggcaacttcaggtatggatcccagatcccttcaattaagtggggcatgttcatccgtgacaggaggaagaaacttaagttttcagtacctactgtatgcaataaatttttatatatcatcaaaattgatctatatttcctttaatcgccaaagccatcttacagagtattatgattatgattattattattattaaataaaccaagcttcagagatgtagggtattagtgctaaacaatgacacaaactgtcaaagtagatgtctaggaaacccagataaatattgatttaagatttggggatttctaaagatgataccagaagctatttaatcaatctcaatatgtccttcctgtggcctagaatttagaaggctttttcataactcatcccagcctctgatttatgtcattcataaaatcatgggtcagactatgttagaacaatgactaatattttctacatataatcaaatgggggttagcagttatttccatcacacatatatttatttaatatctactttatgcaaggcattggctgatgttgcaaggattactgagttggctaaggcccatgtcctggcttcaggaattttcaaatccactaaagaagatgaagcaagtagccaaatagaagcccaaatgagagatttaaacaaattactgaggctgtaaaaaagtgagaaaatagaataagaataagaataaaggcaatgtggatgttccaagacataaaggtagagggcagaaggagaaccagaacttcaagtggaaataaatgacacaagcaagagtatggaagtagaaaaataaaacattttatgggagtagcttttggtttggtttgcttagaaggtataacatatgtagtggagtaagaggaaagatgaggtcagaagaacaaatgaatggtgaaatgagtagacttttgggtaccaattgaggagtgagttcttatttcagcagacaatggaggggagacaagagcagtggatgggagcaggacagaggctattccttagataaattaaactggcaataatattttaggatgaatacgtgaagtcaaagactcaagtttggaagaccagatacaagccttttatgctggttggggaaagggcatgagaatctcaagcaatataacaaccatcaatgcgttgcttgcttaccctgccagttaatagatgaggcatcttccattctgtagacagaaaaggtggagaagataaagagtggaatcagggatgcatgaagaactaaaacttagaagaggttgtatgtggatatggtttagccaagggagagagaagagacagaagttactttgaacttagattagaaggaccgttaacaaaattgggaaatcagaagagcaatttgcaatgtcaattatgagtttggttttgaaaatttttcaatctagttagagagatgtgatatatatcacacagttagatggcaacaaagatagtacgtggtaagtaaaacatcagtggtatctgagaaagaggagctaggagataagacaagtaacagtcattggaggcttgattgattcaggccactttcaaaataaaatgggatctttttgaaccttgatgaaaatgactgagctcagtaattatcagtctcaagtgatgggaaaggggctggtacatggtgggtggagagagacagtgtggcagaggaattaagagcatagactgaagacctagaatatctgagattaaattctacctctgccatttattaaccatgcgaccttgggaaaattgtttaccctttctgtgtgtcagtttcttcatctgtaaaatggaacataatactgtttatctcatgaaactgttgggtggattcaatgaactcatagttttaaatgctcaaaaagtacctgtcacctaataagctctacagaggtgttggttacatatatgttacaatattctactcagatgctgctatgtgctactaagtgtatctgctctgttccttgaagatcactgtaggcaatgtgagacattgctgatgggagtgcattgttctatgaagtgtgtggaagaaaaatgactcagaactactgagttagcgagatgaagctgccaagggaagggtttgtaattacatcactaggcgatagagtgtaaaaacgtgtttcagagtagagaaatgccttaattggagttgatttttaggaagattaacctggaaattgaattttggaacagacagggacaatgggcaaagaagtggtattgggcagtgttggtggagagaaacagtctccatgaactaggaaattcttttcggagaatattaagtaataaagttgggagttgggctcaggttcaaatataaggacttcagtgcaagttaaggtgattgtcttcttggggagagcttgcaaccactcagattttctgagtaagagaataacaaaatgcaaaaagtgtttggggaagacaagaaggtaactggggagctagaacttaagacaaggagactagattggttttgtcatattttggacacaaatggaaaggtactccatgctcatgcactggaagaattcatcttcttaaaattcccatactactcaaagcaatctacagattcattgcaatccctatcaaaattcaaatggcattttctgtcgacgagatggcctcaccatcagtaccacacagtattcctcccaccactccacagcccagctgtggccccagccccggcctcaatttccaacctgatcctaccctcagctccagccccagcgctggttccagcccagcctcagcgccagccccagtgcagactcggcgcagttgcagccctgtcctgctctctcaggccccttcccctgggggccgcgtggtctggctgctcccattcattttggcctccattgtggacagctatgagtgacgcaacgagggtgctgcctgagttatctggatcctgctgggaactactaagacaccagttgcttttcaatgccacacaaggagtcagaagatgaggtggctgttgacacggaatttgctaagaacgtgtatgaattgttctttaatgggtgaccctaggaggaccctgggggtgatgttcacacctctgacagtgaaatatgcatattctgacacggaatgcattggagttgacctgaacatgaagacctgtcttagccccaaccaggtgatcagactctcaagtgacttgcaataggtaagaggggcaacagctggcacccaggatgccctgagcacagtgttgcagtaggcagacgatgtgctgtctagaaaggtgtcagctgacaatactgtgcaccacttcctgatgagtctggttaaccaagtacccaagatagttcctgatgactttgagaccacgttcaacagcaacatcagtgacctgctgatggtgacctacttggtcaatctcacacagtcagactgccctcaatgagaaagtcgtaagcctcttaatgggccccaatcctaggactcagaatggagtgaagtagaaatgatttctttgtggtttgagtcacactgagtcagtcaactgcttgtgactttaaataaacagagtttcaaaggcattttacacagaaatagaacaaaccatcctaaaatttgtatagaaccacaatataccccaaatagttaacacaattttgagaaagaacaacaaaggtggaggcatcatgctccctaaattcaaactatattagaaagttataataattaaaacagcatggcattggcataaaaacagacacacagaacaatggaacagaacagagagcccagaaataaacccatgcatatatggtcaactaatttgtgacaaagaagccaagaatatataataatgaaatgatagtctcttcaataaatgatgttgggaaagctggacagccacatacagaagaatgaaactggatccctatcttagaccatacataaaaatcaactcaaactggattaaagacttgaacataagacctgaaaccataaaactcctagatgaaaacataggtgggaagctccttcacgttagtcttagcaatgattttttttaattttacaccaaaagcaaaggcaaaaaaagcaaaactaaataagtgagaccacatcaaactaaaaagcttctgtacagcaaaggaaaccatcaacaaaattaaaggcaacctacagaatgggaaaaaatatttgcaaatcatatatctgagaaggggttagtataacatatataaagaacacttacagctcaatagaaaaaaaaaatccagttacaaataggcaaaggaactaaacagatatttttccaaagaagatatacaatggccaacaggtatgtgaaaaggtgttcaatatcactatacaaatcaaacaaaatcaaaactataatgaaatatcacttcacacctgttagaatggctgtcataaaaaagacaagagataagtgttggtgagtatgtggagaaaagggaacccttgtgtactgttggtgggaatgtaaattggtgaggagactatggaaaacagtatggaggttcctcagaaaattaaaaatagaactactatatgatccagcaattccctaatatatatctgaaggaaacgaaatcactaattcaaagagatatctgcacccccatgatcactgcagcattacttacaataacttgtaactacaataattaaaattatttactatttccataaacaacaatttctatcaatgaatgaatggataaggaaaatatggataaagaaataagcacaattggagacatacaatggaatattatgcagccataaaaagagggaaattctgccatctgtgacaacatagacggaccttgagggaattaagccaagtgaaataagtcagaaagagggaaacaaatactggaggatatcaattatacgtggaatctgaaaaaaaaaaaaaatgaactcataaaaacagaacagattggtggtggccagaggcaaggggtgggggttgggggaaatgggtaaaggtggtcaaatgtacaaacttccagttatgatgagttccaaggatgtaatgaacagcatggtgactacagttaacgatactgtatgtggtatatttggaagttgctaagagagtagatcttacaagttctcatcgcaagaaaaaaaatttgtacctatgtcaggtgatggatgttaactaaacttattgtggtcatcattttgcaatatatacatatataaaattattatggtgtacactttaaactaacacaatgttatacgtcaattatgtctcaataaaactgggaaaaatactaaaggaaaaaaagcttattgcaaatacacaagcatgacaatttggaattttccacaaaaattaaaaatattgaatactttaaacttaaaaccctggtttattcattttctgagatgacaaggaagtgagaagagctggaaagactgtcccagtctgaagttaatcttgatacgaatgatatgaatgggggtgaacataagtggcttcaaatagaaaaggatttgcatgattggaaagatacaggtctcccaaagccaggtctgagaagtggcctagtggtcatcagccaggagaccctgaagtttctcattttagatgctcctccttctactacagccaacctatttccaaaactaccccagtactgtctccaatcaagccccttccttccactcaccactgccgtggtcattggtagaacattcatcaccatttcacacatgactgagattccaaactgatctctgctttgatttatggtcctttccaatgcatcctccacactggcagcacaattttatttccaaaattgaaatcatgccaaaccacctcctcctgaagtctttctcatctcagttaaggagacaccatccttaaagttgttcagtccaaaagtttggagtcttcaatatcatctcatattcttccacaccctacgtccaatccctcagcagatccccttgactctccaaaatatatccagaatctgacccatgagcatctctgctcccctgacaaagccaccatcccctcttgtctgggttatcttaatagccttccaactacctctccgcttctctctttgccttcctataaaaacatcttgccatatcattgatcaaaactcttcacctatgtcctatatcactacaaggggaagcacaaagcatcacacatgtctgcaagcccccaaaataaactggtcagcatgtcctctttgacttaatctccttctactctccccctcaccctctcttctccagccacactggtcttcttggagtttcttgaaaacttcaacattctctcacttcatggtcttcctggatactttttgtgcttctatttccatctcaggctttcattcaggaattctacactcttaattcatcttttataaaatcatctttccaaatctctcagcttttgcacattctctttttgtcttaggtacctacttcttattatcatgagatggaaagttaaacatcgtgcaagacccagagcaaatagtagctccttcaacacagttttcccccaattcccccactgagcttagtgctaagatctctgcaatgtgttagctatgggatgctgtgcagggtgcttagcgtctttctctacttacccatctgtaaaatcagctagtataaatatctcttagggtcattttgcctggcccaaataacactattgttattaatacaaatggatacttaaataattaaacattaaatttctataattatttattattggggagccaactgttccctcttctgtgctcttaaggtgactggcacatacacttattataatgcttcaaaagttttagttgaattctactcttggataactgtctttcctgtcagacaatatgatgaatgaaagcagggattttagttcatcttgtttctatagaattcccagcatatgacaggccttcagtaaacaaggctttgtggaagggaggtaaagaaaaacaagttctgaagaaagaacttaccaaacatggcaacttgctggatgtctatgggtaagagacagagctattaaggataagactgtggttggagccacgataagcagaaaaatctagtactatagacacaacaagaggaaatcaggaaaggaaattagatttctgaaagcacttttagatacactggtatcaaggcaacacaagacaggtgagtggtaatgtttcacaacatgttggagatatgaaactggagctcagaaaggagatcttcatattatagtaagaattgaactatgtgctgcatatgtacattttctttcaggtggtatgcattgacaaatttcaaatttgcagattcttgtccccaagaaccaaggcttagggtactcagatttcaacatttgaaagtgggaaagttgcctgtgctcttttctcactctcacttctattttctcattcatgcattcaaaagcatttataaaatctgatacattcattgctttgtgatagttctgtttcctttatggcatgtttttaaccaccaatttgattgcttcttcttgataaacagggctgtctcttctacatacctcctttctcttccaggtcttaaaataatcctacatagaatagattttttttatcattcttagccaggtgtgtgaatggtctctttttagggattttttgggctgtttctctactaaaaattgtttgtcactgggaatctgcagcaacttctagtattcagcaaccaaagctttattaaacagtaggaataatggatatctattcttcttctaatctctaatatgctttgataacattgctttcttgcacttaataaaaattgtcaatagaagattttgacacaacttactgacaacagctgtaagattccacggatatttaaatgtgaaaatgtgcaacttagaattgatgaaataacatcatacagaaagctagtattactagctttctagtactagtaattactagcttttactgtgcaactactaactgccaggcaacatattttgatttatttgtttccataatcatttcagatgcattcttttattcccatttggagatcaggaattgaggcttaccgtgacataattcacccgcagtcacacagctagcgagcggtggagcacagatttgaacttggctccgtagttctccaaatctcttaaccactgctgtcctgtctcagccaggaggtggcttctgtagaggtctggctctctggcattatagttcaattaccctgcagccgtggtttcaaagtgtagttctaggatcacccataagagtcctctggggaggctgtttaaaaaacagacctctgagctcccctccagaaatactacggcggatctcttacggacatgcccaggaacctgtattttcaacaaatctgctaggtgactactattctcactgtttttgaactccacgttggtaactcattgaaacgtctctgataagtggtaccttctagcttttgtttggtttataagcacagcattcatttatgtgcatccagttgaaaacagtgaacgtcaataggaaataaaaactggaagcaccactacagtcaagaagaatatacacagttctctgaacaaagaagaggattgggtaagagaggccaatttttttagtgtgataaaatacagagaacataaaatttaccatttgaaccattttaagcgtacagttcactggcattcacacattgtgccaccatcaccaccatccatctccagaacattttgagagttcatttttaaaactttttttgcataacgtaaaatcttaccagcaggatactaatcttgaaataataaataattcacaatgtaaataatttttatcctttctctttcttcttttcaaaatagtatcataacattgtttcatattaacatttatctttccaagtgatatttaagtcaccatttagcttacctataagcacttctattaagcgcattcaaggagaacatacctaattgggtagagccattaggtaatgagagattctaaaaatagtgtgtggcaacaaattaaaaaaattatctccctgtgtgccttttatgataagggccactgagctaataacccatgttttatgattatccatgtgttttgtcacgtccaaacacagagataaccacaatggtctgaaaacacccccagatgtctgaggtggtatcctggagggtggtgtaccgggacaggtctggaatcaaatttggatccactccatgaaactatgtgaccatgtgatcttgatcaagttactgagactctttgaatcatgttttattttctctaattctagaaaaaataccaagcactgctgtgtgagagttactgcgaggactgaatgattgatgtatctatgtgaacatgtgaggtgtcttagcacacaatggtgctcacacatgttactttcctgcacttttcatgagttcaattcaattcacttcaggcacttcaggaattcttcactgtgggcagtgtgtgctgaacacactgttaggtcttacaaataaaagataaatatatcattgtgtctgctctaaaaagctcagatccagaaagagaaagtaggcaggtaagatgatcattacgctactgaactgataaaaatatcagtaggaaaatacacaaagccatgaaacagtaaagtaggaaatacttcattttgtcattgattggagtgttgggaaaggtagatgatagcttaaaaaaaatttgccatggagtttcttttgttttatttttttattgaggtataattgacatatgttgacatataacatattagtttcaggtgtacaacacaatgatttgatatatgtatatattgtgaaatgatggcgattcctaagtttacacagggattcacggaatacatatgcatacacaatctaatatatatgcattttttcctgtcaagccttggtatatccattttcctctccctaaacattcaaatgttgcccttcacttagttaatcctcctactcatcttttggagcagagtacaaatattctctcttctaaaaaatctgaaatatcctaatactggagtaagctctcttccttgtgctcctataacatgttatatttaactgacatactggattataattgctagtttacttgttgacacatcccatgagagctaaaagttcctgaagaacagatactgaataattcatcattgtatccccagttcctaatacagtgcctaggtgtggtcaataaaaatgtccataattgattagtaaattggtattatacttatcgacatttaggtcctcaagcaaattacttatttaacaggtacctggtgtctttcttaggatgtattacatgaaaatgtcatcttctactctggtaaattaagaccatgatgtatctattccctggttcccaaagatatggtaaaaatattctttttgtgttccaaatatctttcctgagatcagtaagatacaggtaatagcaaagttagaatgactgtactagtataggtaccacgtgttttaagtggataacagtcactgaaaacctttattcagcctcaactatagtctcagtctcagctgatagatttaaaaaccctttaattctctcaatactgggtgcagggatatgtgtgagtttcataattttgtcaataaaacatggatgaaatcaggaaataatcatttcctgaacataattccatgcctttgtgtcaggaattgtaccacccatttattgagacatatctaaaatgtgatcctattttctaatcaaaataactgcaatatagtaaagaagactaggcatgtaaatatgaataaagagcaaacacaaactcatgatgacatatataaaaattaaacaatgagatgtaacaagagtgaggtggcatataaatcaggaaatgcttttgaaagaggagagcattgagctgtgtcttaggaaaagtgatggggatgctttggtaagaagaaatgggaagttatttctaaagaagagaccagcacgggaatacaaaagatagatgtatattaagggtgacattattgggggtgaatggtaagaaggtagaattttgctgcatttaacaactaattagaaggaaagagaacagttgtgttgggattccagaacattcaaataatacgactgcaattttcagttaatcttattagcagtaagaaataagatgagcaggtaatgaaacaggatgaagcaaagatttcaggaatctttgtgcaagaataaccagagcgcaacatctaactactcagaacagcaagttttgttgttttctcctcccctagttgtcctcaaatgtacatttgtcaacgaaaagtcatcgtcaatgtgtatactcattctgactttgcaaaaacttgtggtctataaagatagctgaccaccagtactttcttctagaacttacagacttcagctaaaaagtgattcttgataatcatgataaaactttcaatggataacaagcttcattgaaaaagcacctacaaatcaagaattgataaataaaattggcaaacatcaaatctcaacaaattctgaccctccaaagagaaaactttgcaatagactttaacagctttactgagataaaactataccaaaaagtttgcctgtctaaagtatgcgattcaatgttttagattatttatggagcttgtgacaatcatcataatctaatagtaggacattttcattatcccaaaagaaagcttgagctcattagcagtcactctgctttccctcccccatgtggtagcacatatctgtgcttcatttattttgttaccaaataatattccattgtatggatataccacattttgtttatccactcctcagctgatagatgcaataggctttgtatggcaatttcgaaatcaagaactacctctcccggggactagtatatttagtatgctctttgggtccttcatgacacttttgtagttggtttaagtttttttttttttaggaagattagccctgagataacatctgctgcaaatcttcctgttgtttttttgctgaggaagactggccctgagctaacatctgtgcccatcttcctctactttgtatatgggacacctgccacagcatggctttacaagtggcatgtaggtccacacccaggatccgaactagcaaactctgggctgctgaagaggaacacgtgaacttaaccactgcaccaccaggccagcccctaatacttcttaatataaaaacaagagcccaactattagtccacagccatcagggaatagctatttctttagaccatcttgaattctttcagataccacactttctttgaagacatgtttgttttggtccacctctgaacattgagttatagtgttcttcccctaattttatctccatatatccacaatagctctacagtacaaaatatattctttggatcattctcacagaatttgtatagactctagaaatagctattgatttgtcttgaatttgggataaaactgttttcaaaaatgggaatagatgtgttttcctatcactgctttctctccatagatatatatatccatggtgatatagggctgaacaaatattaaataatatatatatattttctaaatgtatgtgcatgtgtgacagaaagaaagagagccagaaacagacacacacagagggacagaaataaagagagaaaaaaaagagagacagagaaaagctcaccatatgcaaacatgggtatatagagagatatataacgtagatatcttaataatatctcactacctataatttaggtcagaaaattgtgaaatattataatctaagaaagttttttttttcagatttaaaaagacttcaatgattttaaatgtaaaacaaacctatattataactcctaaaattacaactttagaagcctcacttgaggcattctctggaatattctccagaaaaaaaaggagggaaattgaaaataattgtcaaatatgtttatcccaagcacttttcatagatcctcatttaattcttccatttctaaaaactaaaggcaacttttaagagtatgcttttattaatctgcatgtctttgtttctcattctgaagattttaaaaaggtagaatgtaatctaatggtgctgaaatactgcatcagcttttaacaaaagagccaataccgcaatgctgctattttattgctcacaacgtatggtttccagttgagaatcccattaacctcggagtgcaatgatatcattttaattatataaattgaaacagcaatgtataatacctatatcatgtaaaaatggattcgctttatgtgaaagtgtctaaactatctttcactatgaagcaataaatttgctttagatggcaaacctgcctgtaaatttaattactggtaattttattttcctccacggtttaacctctcttagagcctgaccgggaatatcataaatctgtacttccatggactagtttggaaactactgagtaatgataaatgagtatttgcccagattttaacttagagaagcaaataaatataaatgtgggtgggaaataattatgccaacctgtagaaatcatcacaacttaaattcctaatttgttaaaaaatacactttacttactaaaactctttttgttaaaacatataatcaaataatacatttcacagaagagaattactttcatgtatctgaagatgtaaatagctgtgtgaggatatgaaaatatgagtttcacataagagagagatatttgcatttgttcaagagaaagacgagtttatatgtagtacagtctcttactacatattcatagaatcatctggtatgctagactatctcaagggtctcactggaaggaagtcatgcaagactagagagagtttggggggtgtaggagaaatgttctccattgatgctttctctccttccttagaattccctacagggtagctagttctaaagggagtggaaaggaagcatggttgcgaagggcggaagttagcatatttcaacagtaattaaatgtgacatacaccaggtgaaaacaatcatatgtcttcctgtgaacagacagaagagtacagcgcatgtgtaagagccatgtcacttaaccagagggtctggacccacatctgggctctgccatttactggctttgttacctggacaagtcatttcacctctctaaaccttcaccccttcatctgtaaaatagggataataaaaccacctccctcagagggatattacctgaaagagctgagaaaaagcttgtgcaatgcttagaggagtgctcagcacagaacaagtgctcaataattatagatctgccatagccgcctgccattctgcatgtttctgtctgttccctctacttcagggtgaacttcttgtaggcttggtctctcccttaaccatctaagagttttatcctggatataccatttattagctctatgaccttgagctagtttttttttttaacttctctaagctacaatttcctaatctttacattaagactaatatttaaaacacattttatctggctgttgggaagattataggaaatatttagcacaggacctcatacacattaataacattcagtaaatgttacatcttatcacttaatgtggaactacataccaaccaacaagattttggaagacgtactataatttaggtacaactttaacacaccaattatatctatcaaagcagaatttaggataaaacagaaaagcctttttcacagttaaccatagtatctgtgaattatattgctgtcattatcaataaacacttaaaacaatcccagtaagcattgagctattttaagatacattttaaattcaggaagtttaaattcatcatatacagtttctgaattacaaagaaggataataggttcctaacccgtatctgggtatgtcataacgttctgaatgtaaaaagccgttttataagttttgaaaggcaatcttaagctaatgtttccacttaatgcacagaccatccttgattatgcagctagcagacattttgagggaatcgaaatcacattttcatgatatcatgatttctgaactatatctgaaagagaatttactacagatataaaaatctgaaaaggaacttctggttctaaattcgatgagctaccctgggtgggcttcacagatggagagagcggagatgagcaccgggctccccattactctgcccacctgctctgcctcaattcaggcaacagcagggcgggtgttctcactgcaggctgccggctttcccagcatcccatgttgactgggcagaaaggaaaccgccatagtgcagagagaatgaaactagatatgaaaaatgaaagaaacaactcagagctgtgttgaagtaagaaagagggagaaaagaagaagagggcagagagagaaaggggtgccagagagagggggcaaaataagagacaatgaaattaagaggaaaaaaatgatagaaggtggagagcaaaacaaacagaaagacaagagccacttgtgccaaagaagaatcagagctagttttaaatggcacaaaatatttcttttatatacttagcaggaatctgtttctactctgagacattgttctattacttttcacatattgtacatttaatattcacaacactcagaagtaggtattgttatcgccaattcagggatgaggaaatggagcgttagaaattaagagaacatatctgagcatttaacaggtattggggatacggaagtgaacagaaccccaagcccgtgcccttaggaagctcaacctaaaatgctagaggctggatttcttctgagtttggaaagatgtgaggagtttgtatgagagaacgtacaaatgcatctaatacacatactgaacacagtatccactttgtaaagttgtttctttagcttatgacacagattttgcaattagaacatctcatcaattctactttggcactgtcagattacataatttcaatgagacaaaatttactttaaaatttttaacacaactcaaatactttggtttttttgccagctgtcaatgggtattttaacccaccatactatacggaatctcttttaataacgtacgtcacagcacttcacagtttaagttgatggagaactgcactccagcactacccactcttctatttgcttaaaactctatttggatgccagaagaaactcagacacaattttgctgtgtaagtcaatctattggccaccgaatcaattctgcctaacaacttttccaaaaaggcacttaaatcaatttgctacaaaagtactgcataaaatgacatatgtacaaactatacttagttatacatagaaaattaaccccgggagattcagggctcacatttgagtgcagttcttagtctcaggatactttgtgagaaatactcattgataaagtaattgcagcacatacgcggcatttatgtgtgtattagtaggaaattaacctaccaagtatgaatagctttatttttataagactttggaaaattttatacatcttaagaaaattcaacgtatccttttctgagtggtaatatttcttttagctgcgtcagcagggaacaaagggaccaaacgcaaaggaagcagagtctgcattgactgagattttaaaaagaaagttagtggattaattccaaagaaatcataacctaacattgaggggaaaatgccaggtttttagttagcctccacagagaaaggcacatgggtcataagagaaagtgggattaagtgatagctactcacagcggactccgtccgttcaggaaggagtaatggaggtacagtgcctctgtgactggtgagaaagcagcaaagccagaactgtgaggacaccagtgacctatgtccctagttagggctactgggtgacttataatatcaagaaaaaaatccttttgcggaggtgtaaaaaatatctgtatttatagacacacctataagcctgtatattttaaagttcttattcttctgttttggctaaatttgaatagtgtcacttttttgcaagaatagattattctgagacaaatactggggtctccctttttctttttcttttgttactcaagttaaattctccccaaacatgtattcagatgctataattgactagatgataaattgtgaaatagacagtataagtttcactgtgttataggaaggagtaatattccagatcaaacgttagatttatacagtggctttttcaaacacacttaatgagaaaacatcttagtgcaatccttcataacattttgaatcagcagagaagctggctgaaattggaacagagtaaaaaagatcctatttgtgttatttgaataattaataaaattagcatatctagttggatcaaacttttcctttataagaaatataggcagtttttctgtagagcagatctgtggaaataggatacatatggtctcctccacttgaagagatttacatgttctctgacagaaggtaagaggaagagatgaggtgacatttccaagtcccttctactccaatggttatcatttgcttagatgtaccataagaaattcaggtagaacaaaatggaataggactgtaaatatctaaaacgcagctcaaaagatcaaaactccaatacgaaattaatttgggatgttccatttttaatgtcccattgaatgaattgtatcccaacaccatagggtatgcgcatggctgggtcagtctgatgggatatcatattcattcttatagcatcactagagaggggaagcaacattattttcattttatgtatggagagactgaagtggacatgattctctaacggtctgctggagataaaagaagtagcatcaatatatgatgaagattcagagttactcaactctattttgatcaagttcagactttatcaaatgtacttttcctctatccaggaaactaaagttgatgacactgcaaaaaaggctataggtcttcagttactgactgtactcttggcagattagacatttcaaatcacattttcaggaatctagacaaaagcactgagctgtcaatcctgaaataaatcatagcagtggggtccagattgtattttaatttgtttagtaacagtaataaattaactagcttcaatagttttagttttaaatttaaatactctagctttcatatctcttgtgttttctctataatgtgtctagtttctaattatgctatttttaattccttaatagtctacttaatacttgtatacttaatgtttttttttcttcctttttaagcaaatcaaaataagaacatgttttccctcggtaaattagaaaacaatgtgatggaatgaaatgtatacgttgtctctacttttttaaatagctgactgagttaaaatagtcaacaatttcccatgggccaagttttccaataaatgaaaaacaataagaataagtcaaagctaaaccaagtttccaaatgtgcctgcctagaattctttcagcccccgggcagatcgactatcgctattttgatagttactaataacaattaaaagtaatggaaacagttttcaagaaaagcgataaatcttcacaattcaatacacaaatagaaactgaaagcccctttagaaatggttggaatattttttgttttgactcctgaaaggagagtaattcttaaaaatcatactatgggatgcttaaacaacaatggccattggatcatacacaagtgcagactttgacataaataaccaggatatttagtactattaaactagtgcattatcagcacatctaccagtgaatgtttttgaaagattaagaaataagtagattgcttaaatctttcagaaagataatggatggcaagttaagttggtagacatgactgacccatgtactttctgagctcctaatgttgctgtgtgggtaaaggcttggaaaaatcccagtctatgaaattttcatttccttttgacaatcgcttctttcttcagactcaagcttaacaccctcccattgaggataatctgtggattcctctaatgctacttcccactattttttttctgagaagttgtttctttcagcctagctatgccttggcagacaaagatactcatcccttcttcgcaacccccatctcctgcagaaagcgcacatgcctgttgcctttcaccagcagtttccaacccatctcgttccatgaaacacaggatatggtaccctcctatgagaatttcttacctattatctccatctttttctctccaaatcaagaaaggatgttgggattcaaacgagaacaacgttataataaggataaccctgaatagacttttaaaactggaatcttttaatataaagctacttcagctactataactcataagttactcatgacacgtctcacaactgattacagcagagcccccagaaaacctctggatctttctttggtaagacggctgcatctgtctgaccccttcttccttgctcacaggatgcacagatccctcactgtcagcctcggctcctcatagactgtgctgcctttccatctgataaggaaaactggtgggtttgaaagttgttgccaagaaacccaggggttcttattaatagtcccaggaagtcagaatcttacgggtaatgtgtgactaacagggaaggaggatcgacgctgtctgtccaaaggatggccttccaaagaatatctttaccttctgcaacctacttcctttaagcaagcattcatcagggccacctctgtttctgtcctgctcacaatccccatgtatcatggactcctaggttccgcctctaacttttctcctgccttttgttctgggatattattaacaacaaatcagacccaaaactaaaatgtataagatattttcatctatgttatcttatttgatacaataaggaggagctggatttatattggattttctgaacatcatttatttttatggagttcctagtcactctctgttcatacagttaataatatgaatagctggtctggaacttaggattgtaatattttgcatctaaaatttagttaactgtttgaacagataaggagagggtcttttagacatagctattcatttaaaacaatgcatatttgcttttatctgttcttaatttggaattttggatttataaagtccttgcttttaaaaattgcctgatttactactgatagtaaggaaagaaatatttgaatggttagtcttgcatactgatttttggctttcttggcttcagacctgctggaaatcctggatacaatttcaaacactttctccaaacttcctctaccattgctgcttcactctttcttcttcattatccatcccttaaaaagtggcacttatttctaggtgaaagtggcatccagggctgatgagaaccatgtaacatcacactgaattgatccctttctcactgcaaagcagagacaattggggctaccacagaaaaacaagagatcaagctcacggctcagctctgttttaacaatgcctgcttcccccctcaaccactcacctccagagacacactgccttaagtgggcaaaccactgagaaaatatcccatctgacaactggctacgaagaagggtcaaaggaattaacccatagttaaggaggcaagggttggcttaagtactttaagcgcacagacagttgttgcacacagagacttgagcagctggtttctatctctgatggagaatgaataagaggaaatctgctgtaggaatgatgtcttttagaaaagaaggaagaagtcttgacagcatttatgaagcatccactatgggctggggctttgcatactttgcctcattaggcccactcgacatccttagggactctagaggaaaccaaggttggagagtcacttcatttgtccaagactgcaaaactaacaagtggtagaacttgtgtttgaacctaattttatagaactgaaaagtcccttccactacagcagcaagtcttatattttatgagagaagagggagcttagaacccttggaaactcttacaaaatctgtggacctattcctggaaaaatacacaaggacactcccacagggccatacgcatgtttgtagctgatgcatgaagtatagaccctaataaattccctgcagtaaactgtgctgctgctaatggagtaacagcaaaaactgggcctgcttacaggatgaaaacaataccctggagaaaaaatggcaatgtctaagagagagacggcatgagtccctttcggtcttctgattctacgcaaatcctttaaaatggtcatccctgcagttcttacttggggaaaatacatgtaatttaaaaacactctttaaaatatctttttaaaatggatctaaattaataataaaaatagtgaattcttgaaaatatgatgttcaggtaagacacatctccttttaaagtaacacatcaatagaaaaaccagattctggaaaaagtggtcttcaagcatattgaactactgaagcagaaaccaatttatcattttaatagcagatagtttaataacagagttgggtgcagagcactctgcattaacggccaacagaggggcaaggaggatggaggaaacagacatgattgtgctaacaggctagggctgactagtattgccagcactccactgatgcattagctatgaagagggcacttatttgtgtccaaataacaaggctgatgctgttgcaaatacaaggaaagtgcgagttaagatacctagagagattgcaattaaatttcaaagaatgttacagagttacaggcattgggaagcaagtgcagagagtgtggccctgcagtagcagagcaagctttatagaggaggtggacccgacaattaaaaggtgtttgaatgtggcagaagttagagacatggaattgagaaattggcaggctacgagttgttaaagaatctttctcttaaaaattaaattaaaaatcaagttctatgttattaaaagatagcgataaaaatgacaatggcaatagtaagcatttattgcattcatattgtcctggcacatccactgttatattattgctaattaaaaaaaaaaatactgtgatgtggtcaaaatgttctccatttacagccgacaaacctccccagttacagcttctgccaggattctaacatcggtgtgtctgactccagagcctgcgtacaaggaattccaaatactaggaaagctatcaaaattgtgtaaaacctacaagacagttaaattttaaatatggattaagttgatttttttttttctgaagacaatctttagggaaaacgggagaataaaagtaaacccagataataacattattacacatttatggctttcgctttcagcggggtcccgacagtcctccttctttgagcctatcttgtctttttccatttgccacaatgacaactggtgacagtggctcacttggccatgtcttcaagtgatgcttagccaccctatgcttagcctcctgaatctaggaaaataagtctgtcttctaattcgctgagataatggaaaccctctgcgagaatatccctttccttccctttccgcattgataaatgtgtctatacccaccgtaaccctcaccaagtttttcgtcatctccaaggataacatcctctgtctcacattaacacagacctcttccaccatatgttgaactagtgtgtattccttttgtcctctatgttcaaacggtgttgtcattgccaaactaacagactcttcagcctagcatctgacactttggacccctttgtcttccttcaatgtctgtcattgtttcctggttctcttcttgccacatcgaatgctccatctcaatttagcattttcttccttttctccagggaacccattacctaatgatgccctgcaggggttattaagttatctcacctgctatgaaggctttcaagcctccaacattccagaatgacttctagaatatacccttccagcacccaagattgcctagtacatagtaaatgttcaataaatacttgctaatcatggtaacaaaaccaaattagttccaaaatacctttctagtttcctttttagcttttcatctgttctcccccaatagctgatgacttgatactttagccacggttcaataaagttgtgatgaatgaatgaatgaatgatgcactgaagtgccttgagcgaaaagttatctgcttgggccaaaatgcatttaaactttatgagaaaatgtatcatttccatgccttgtcccctaaagcacccatctcttcaaactttagtcttcaaggttctgtcctcaagaaatattttaggcctttcccaagaaagcagctatctctcatgtggcaagaaattaaatttaatctgtttgtgtctgtacacagtaaaatgtaagtcagaatgtcagtagcgcttttaaaaagaccaaagtgaatcctttgtgccctactcaatactttatcttttaataaaatgctttctaatcaccaaagctgtgtgtgtgcatgcacaaataatgtgaacagtatacactgaaaatgtcactacattccctgatatattgctatgaaaacttggagatttcccaggcatgatatgacctatgagaaacaaaattctattcaattctaagattcatattcatgtggcttattctagtcacttcctaactaccagagcaaggaaaagtagcctttttctatttcaatatgttattagcaaaactttcactttcatttatttccctcagtcttctcttcatctgaaaaagtttcatccataacatgtataaacatcccctacaaagatactaaggaggaatgaaattttagctatcatttcaactgaagggaaaatttcatggacttagcgggcaacacagccaagccgccagtccttcttcttcactctagagagaaatctcacactgaacgtgcaactctgcctccaggccatgccctctccagttcatcatctacatcacgacagagtaactttttaaaacgcaaacatagtcacgtcattcctctgctgccgagctttcaatgtctgcaaggtgtgattttgcaactttcccagtttcacatcatagcctcatccacgttccatgcccttcataaaactggactggtcccctttcccaaacaccctcagcctccccccatttggccaggagcctttgtacatactaccctgtctacctgcctctccccgcacacaccttccttctccatgacagaggaaacacgagctcattaagatcccatctgaacccagttggcttttccccaatcattttcataccccactcacaattataatattttttcttcctctattctcacatagcaattcatgcataccttgactgaatcatttactttgtggtaatattattatactcttgtttcattaaaatgctttttaaaaaatatagtttgggttctctgactaggctaaattatggctggaacataaaaattacacagaaaatgttttttccatatagtactttatggtccttatagagtggaatgaaatggttaaaaaataaagttctgggcttctgtacagtagctggaatgtttgatactgtacaagggaattatgaccatcggtgactcaggagcagggaggacacacttttaaaaagcttttctgcagcatagaagttactctcgtctaagaaacactcacaagttataacatccctaacccagagagacagagagggtattgattacgagtgggtgtgtgtatactgtgtatatatgtatgtacatatctaaatacagaaaagacacagtaaaaatattgtataaaagataaaaaatgggagacctgtagagggcacttagcaagactggagcctataaaactggaagttgctctgggtgagtcagtgagtagtggtgagtgaatgtgaaggcctaggtcattactggacactactgtacactttacatacacttaggctacactaaacttataaaaaatatttctttcttcaataatgaattaaccttagcttactgtaagttttttactttgtatactttttaattttttcaactgactcttttgtaataacacttagcttaaaacagaaacacattgtacagctgtagaaaaatattttctttctttatatccttattccataagcttttatctatttttaaaattttttatttttaaacttttttgttaaaaactaagacacaaacacatacattagcctaggcctacacagagtcagaatcatcaatatcactgtctttcacctctgcatcttatcccactggaaggtcttcaggggcaataacatgcatggatttgtcaccagcatcaccacaaacacatgagtagtatattgtgctacaatgttatgatagttacattgtcactaggtgataggaatttttcagctgcattaaaatcttatggtactactgtcatatatgtggtctgtcattgactgaaacatcattgtgtggtgctgactgtaaggctacaaaagaagcttctagaatttaaaaatcatgaagattctgcattgatctgagaaaatggcaacttcaatttcagaagtaatattatttaaaggacatcattaagtagatgatatcatttcagtgcatgttgcacagtccctgttttatgttttgtgttgttttctactgccccatatttcagcattttcttaggctgtatgcatcagctgaagttcgcaatatactatgctatttacaaacccgcagcagtcaacatctgtagaaaggtttcagaagtgatttaaagcctgcaacataagcatatccaatcctaatggtacacaagactatatatcttccttgggagactgacacatggttcccactctgactggtgataatgcatgcttgccaagcccagatgtagtttcaactccagggagatgcaacctaatgacggatcggtataacccaatcatgctaacacttgtatctggaaaccctacagtgtagtactgacaatagttttttaaatttcccttaccatgtttcttcaagtatatcaagatgttctgctaggatgacaagcatacgattgaatttaatggtatataaagatatggcagactgctttccaaggcaaaaattcatagttggaactttcatcaattaattgcacttctggcaaccgcactgaacattaaattaagtggtggaactatttcattagaaagctttggcaaaataaacctaatagatggaaagctccatataattaaaaatggcaggtgagctgctttctgggtgcttttaagtcctaggtcttaacttcatgtctttctctcctgctacatagtaagttcctcaagggcaggggctgaactctagttatctatagttcctagcagaatccacagcttaaagtaggcatttaataaatactactaaatccacatatgaattcagatatcaaagcccttctactaatgaaatgaatggctgttatgggttgagttgtgttcctctcaaattgatatgttgaggttctaacccccaggacctcagaatttgaccttatttagagataaagtcttaacagaggtcatcaagctaaaatgaggtcattaggatgggccgtaatccaatacgacaggtctccttacaaaaaggggaaatttggacaccgagacagatgcacacagggagaatgccacatgaagatgagcacagagatgggggtgattcttctataagtcaccaaacaccaagggttcccaacaccagaaactacgatgaaagcatggaactgattctccttcacagccctcagaaggaatcaaccctgctgacaccttgatcttggacttctggcctccagagctgtgagactataaatttctgttgtttcagccacccagtctgtcacactttgttacagcagttatagcaaactaatacactggcttagaacaagtcatttaacatctacaagctttagctgtaagatggataaagtgtgcctaatggtggtttggtggttaagattcggtgctctcactgccatggcccaggttcctttctcagtcaggaaaccatatcactcttctgtcagttgtcatactgtggtggctgcatgttgctgtgatgctgaaagctatgccactgatgtttcaaataccagcagggtcacccatgatggacaggtttctgcagagcttccagactaagacagactaggaagaaggacctggccacccactcctgaaaaaattggccatagaaaccatatgaataggagcggagcgctgttgatacagcaccagaaggcgaaaacactggataaggttctggtctgctggacacagggctgctaggagctggaatcgactctatggcactaacaacaatgaactatgcctgacacatggttagactcaataaacggtagccttgaaaatggcaaagaaaataatactacatccaacaaatatgtattaagcaccttttatgtgcagagccctgctttatttctggggaaacagcaattaagatgactcaaccctcacagagctaacattgcagagagagaagacagactagcagataagtaaacaacacagtatatcagatgataagaaactctatggagaaaaattaagcaaggaagaggaatatgaagtaagggatagaaggaataaaatttcgtacagtcttgtctgtatttataaaatcagaaaaaaaagacttctaaaccatatgaaggagttagtaagccaagtggctgagggaagaacattccagacagaacagccagtacaaaggccctgagatggaaacagtcctggtatattgtgataacagcaaggaggcaagtgttgcagagcagactgagctgggtgagagctctaggagatgaaatcaggtacgatgtcagagagagacagggagtcaagataaagcagggaatagaagactgataatggagccactaggctgcttggaggccattgcaaggttatgagcagaggggttgatatgatctaactaatgttttaacaggatcactcaggctcctatttggagaatcatagaaaaggaggtaaagcagaagcagaaagaccagtcaagaggtcattccaataaccaagtgagtgctgtaggcagcttgaacaaggcagaggagacgatgagaagtggtaccattctggatatattctgaaggtagagccaatgggatctgctgtgggattggatatggggtatgtgctaaagagggaagtcaagggtgactcctggtttttttatctgagcaagtaaaagacgccatttaattgagggaggtcattttggctatttgagtacttaatactttaattttggaaatgattgttcataacatgaagtctcaccacatcagaaggacttttatgatttgaatacttaatatgagcaaaaaggttccaagcaaacaaagaagactaaggtcaacttaatgaattaaactctgtgagaagcatggcaaattgcctagtacaaagcaagcactcaataaacatctgttcatttactcgctcattcaaagcgaactcttgatctggcattcagctctctagttcactttctattcaaacctttattaactcccacttacttttggctactctatagtaccttacttttcttcttcctcttctcctaaccatcctacaaatgcccggcaaatttgatttctgacctctgcacaaaatctacattggtcaactttggggttttttttaaggaagattagccctgagctaacatcggctgccaatcctcctctttttgctggggaagactggcccttagctaacatccatgcccatcttcccctactttatatgtgggatgcctgccacagcatggcttgccaagtggtacgtaggtccacaccggggatccgaaccagcaaaccccgggccaccaaagtggagtgtgcaaacctaaccactgtgccaccgggtgggccccctgtcaacttttaacaatagagtaaagttaacatttagcctgaccttctaggcctgtgacaatacatttttacctatttgtttacatctatggcttcatgtcttagtcagttcaggatgactaaaataccgtagactggatgacttaaacaatactcatttatttctcacagttttggaggctgagaagtccaagatcaaggcgtccacagattgggttcatcatgaggccctcttcctggcttgcagatggctgccttcttgctgtgtcctcacatggcagagataggaagctctggtgtctcttcctcttcttataagggcacgaataccatcatgaggactctatcctctcgatcttatctagatctaagtatttcccaaaggccccatctcttaataccatcacactgggggagtgacatggtttcaacatatgaattttagggggaaacacaaacattcactccataagacatcatttggaattatctgatccagttagggtcaactccttatcattcttcaaatgaaaaattcccaggctaatttctaagacattattcatgtttttctcatttgaaatttccttcgccctgtcctgcactaaaagaaagcatgtctattttttccagactcagttcaatgcggcccttttcagccactccagcctatgatgtttagcctcttctctaaaatcctaagagcatttattatttgaacaacattcatttaattacaactttttagccctattctctaaagccctaagcatttattctttgagctatacacattttggtactgaattgtgctgtcttactaaagtgcaaactccttcaagtccagaaccatatatttttcatcttttctcccttggtatctagaatagtgccttgcttgaatgtagggatcaatagatgtctgtggtgtgcatggcccactagttgtcatatcaactagaaactgtgatgtcttagattccagagagcatttataatccgtttcctagcaaaaggttatgcacatagcactttctcacgtaatgaatgaatgatcccaggaagctagcccaaggaaataattagtaatgttgccaaaatttttacgggtaaatgtgttcttcaaagcattttttataaggaaaaattacaaaataagctaaatgtccactaatagatggcaggatagataaattatagtttaatactatcagacaacaattaaaattaacaatttcaagaataaacagtaatatgagaatatgttcattttacaatggtaagtgaatacatgggagacaaaatcccatatgtggtatgtccttaatttttagaatttagataacattgaaatgttccttgcatctgtaaacttttttcaatttctaccatcattactctcagtgaagccatatcacatttcacctggactatattagcttcttaaacagactttctagctctatttcttcaaatctctacctttcagcaccctaaagcatctagtaagttgtaccatcacttttgtttttaacatggacctcatataatcacttctttctccaaagctgttaagtggttctctaacacaaatagagtaacatcctgacaataaagttcctgctctaattcatccatcctacctttccacttacatcccaccagactccgtacatccatgatccaatccaaccacatactgaatatgccttccccctccccaccactcctcaacactttcccaaggctcccacccatccaccctagctgcaagttccttttttattttaatggtgaagttggatgatctgaaatcccacctcctacaggagccatactttcccccattttcccattccatttcttcccattcctctgcaggcaccccagtctgtgctgtgccattctttacagggtcagcacctgccttctccagatggctatcctctggagttcagcaaccctcttattcttcatattggtgtttctccaagtgcaaatcacagagctgtatacacaagaaagtgtataactcttttaatttaatttaaattttaggtaggtatttgatgtcctgagtctttaccaagtgaagtttaagaaaacttctgtctgaaaccatctattaatataatgattttgggtcagaattagttattcaagaaactttaccctccaaacatatgcatcatcctccaaacatatgtatcactcacagtaattaaagatgagtactaatcatttaaaatccaccatagtgtactgagcatgtttgagtaaattagaaagaggcggataaattataaactacaaaggcactccttctgccagcaaaggaaatctggagttaaaaacccagaagctagctgggcatccttcttcagagagcaacttgaccaatcatagaaaatagccctacattactaatctgtttttccaaaagcttaatttcaaactggatcctaaaactaaaccaaagactaaggatatgatgcaaaaaatagcttcatacatttgaagagggaaaataacatgatattttattgtaacatgaaaagaacaatgtattctgtctaaataggagaaaggaaaataaacaaaccaaactctaagaatatgaaaacacacatttggacttctttatttaagtgaagtattatgtcatattttaacaaaatgccattatggcggttcaattgcttttcttgttcaacaagttcttttgtcaattagccttctttcacctctagacagataatgaaagttccacttctgtgcagccactggacagttcattaggcagaaatgcctgctgttgcctctaccagtcttaagtcaaggctgtgccaaagccaggccaaaagggtttctaacaagtgctggtggctttgacctggctggtggttgctggaagattcagaagctaactaaataaaatatatggtgcccacatacacagatgctctgaagacttttttctactattcttttggaagtattctttaattcacagacaataatagtacagttgataacacaggttcttaagaagatgggaaaatataatgtggctataaaagaattacaaaaagtaattttttttaattcaaatggttcttccttagtataccctaccacagtgaaaactgcccaaatcagagtacaaatacttaagtaagcactttaataaagtacagaacacactcctcacatttctgtttgaaaggtttttttgcagttaaagtaatgaagctattcaagaatatcagggatttttaaaagaattctcctaattgtataatctttagcagcttgtaaaatgcctgataagagctcttcagagtttccaaaacattccctttatatgacattgcgagaaatactttgagggcagcatttacgcactcggaacagagtactctgggtccaggaacaacacccataaactctaaaattaagtaagtcacttttcttcgcacctctggtggccaagttaaaaaaaaaaaaaaaaaggcaaacagtcaacagcaatgaatgaaggctctggagtcctttcataatagtcagttgatcagggtgctcgttgagcggtcttacctcatttcccacacattttctgacctattttgtctgccttttctcagaaggattttgcttgctccactgtcgactaagcagtaaactaattatcttgttcaaatccctttgtaacgcccttaatcctattagttataagaatatctgaatactgattgcaaacctcttttttttttttttgctttttaaagagagagaaaggtccgggggtttgatcccggaggggtgactctagccatttcactggatggaggcaaaggcaattctggccatccaaaaccccaggccacttagcacacaggaaagatcctctcctgtagtcattcagtcatattctctctctgtctggctcactctctctctgtctctttgacatgcacacacacacacacacacacacacacaggcacacacacatgcacgcacgcacgcacagacacgcacacactggatttagcaatcatctgtatctatttgactgccttataaaagtcaagttctgaacactcctactcacagcagagcatggtgaaccctggccccagcaaggagcccaacttcactttccttcttttatcatgaacattttaatgaagagggagatgctattacaagaagtcaaagaagccataggaagtagaggaaatgaacaaatgttacaacggacctctaccagccctatgagtcttaacctcttttcttcaaagaactctcacaagtcttgttaaaggactctctctccctctgtagaagacgccaagaccattgcctcctgctgtctattactgagggaactttaatcacttttccttttttgttcccactggggaaggagccagactgcagtgaaaggcttgcagtcagagacgatgctaaagagcatgaaatttatctgacttctataaaagacgtgttctgcccttccatttctgcttttgccaggcgggctgctctgggttggctgctctgtcttagaaaaaacaaacatttgctttaaacctagaggcaggatgctacctccgaatatccagtctttctagccccctcttctctccctaggaggaatgtctctattcttggcatataaagtcaacgtttttacattaataaaatagtgtctctctcttccattattttttttcctgataacacaagaaaggattgttttagaaatgatcttgaagagaatactgtatgtgtcagaggagagtctcttcttaaacatctttctggggtctgaggaaaatgttataaacaggaggaaagtgcagattcctcagataaggatagaagactgccaacctaacatatttcaagtattaagtgcttaaattttgatttatcttatctttagtaaccaacagagtctgtttaagacacagaagattaagtttctcctggacagtctcttggcatacaggaaagagctctgtcagcatgtgtgtcaaccacacgcatgcagatgtcagtgtatagagaaggaggtgcaggctgtggtgaaagggaaggaactaccactcctgtccatggtctgctgttctagggaaattaaaggcctaaggaaagtgctaagtactgttagcagcagttgacaaataaggagaatacaggtcttggggtggtggggagggtggtgagcaagttttatggtatctatatagtctgttatctgatgcagaaaggattctaggtagttcacagaaatgtgtttgatatggtaggatgcataaatagataagtaactgtagtaaaggttaagttaagggttgttccttcgcagaaatccctgtcccaagtaagaggtggacttagttctgtgcccttaggaaagacaaaaggcacctgcctttgagattaaaagcattacagctatccaggaaaaatatatatatatatattttgatgctgcagcagagaacagatctgcctgagaggtcatatgatgagacagtgcataatgtcctcaaaaacatttcgacatcaacacaagagtaagtgtagcatcagcttcttccaatatccctcaagaccgtcaagggcataacagcaagtacttttgttgggaccaaaaccacacaattgagcataagcatgtaactctgccgtcatctagcctgtgagatattgcttaaatctcaaaaactgaatatgcattaataaggaaaatgtgaaagaaacaaggaaaaaaaagagctttgagtaaatgtatactaatcgaaaaacaataattcttccattgaacttcctcaattgcttggtttgtatctgcttcattatgatataaccatcatgtcctacataattaaaaaacttataaacctttgcattaaattaattttagttttgattcaaaggtctacatgaaaatataatttgttatctccatttacttaaaacaaggtggattatggtcctgctgggtttaactaaaccctccagtgacggccactatctgcagaagaaaatccaggcacagcccgaaaacacaggactggcccctcttcactctccaagctcacctcttactactttcttctccactcactagtcatctttctgttctcagacgcatcaaaatacatttatgctggtgggactttgcatttcctggtctctctgtctcaaatgctgttcagttcttgattcactctctgcactgacgactaagctcaaatgttctattctcagagaagccttccccgactcttttaccttaaacagctcttctctcttcccactcattctccaaccgaagaacctcttctgttttcttcatatttcttattgttttctgaaagtatcccatttattttttttaatttgttcacttatttaatcattacttctagattcctcactatagaatagaagtgtcatgaaaattgtttatgctgataactttggcatataattggtccttccataaatattgatgaatatgtgaatgaaccaaattttcctttaggagagattatgtctttcaaaatatagaatgataatttaagttagattaaacttttttagcctttagaaaaatcagagttgcaaataggactccatgaagatgcacgaaataaacatttctgctttgattatgaaacagaggaaccaataacctcccaccaaggctaagtctttaaaatgctatttactttttttccattactaagaaaacctccccacacccagtaaaggcccacaaactgcatgtgttcagaggcagcatgatccccatgaagtagcttcaaaagagggtaaaaatcaaaatgtccatctgtgccattaaaggacctgacagctcataaccagaccacagcacaaggacttgtttctaagacacagagctccacaaacatgaaggaaaagctaggcatattcactgaccagcaggtttgggccacagcccgcctccccccctgagtccctaactgatataacccactgtagtgactaggactcaagtggagtcctgagtagggagcaagataaacggccacttcagcatatcagcgatggccatttaaaattaattctacacaaatgctcttctgtaagtagagttaaattaaaggcctaggaggccttgtttattggggaaaaaaaacggatgcagaatgttgtagaatcaaggccaggaaccaaaaaaaatgtctagctgtcagcgaagatggttcaagaattgtaaaacgctgtattttctgttatggccacttaggggcactcaaaggctgagaaatggtcatctgggtccagattttaaaactcatgatcttcgatgtgagaccaccaaacaatgtatcacaagtgtatcctgcacaccttcctagtaaagatcagttcccttctcctgaatacaactaagctttcctaatccggtaacaatcacaaaaaaactttaaagcacgttttaaaggaaatgaaagaaggaagtggttgccacgaatcaggagagtatttccctctaggcgggaaagaggtaggtgtgataggaaaagacatgagggggaacatgtggcatgatggcaggtaggcaagcctttcctttaaattgttgtgaacacttatgtatggtattctgtgtgtgtgcatatttcacaagatgttaactacttctgatcatgattacatttcacaataggaactttaaaagtacatactaaaagtgaatttgaatacaagagcctttaagtacagatacaaagcatggctttaaacctctctcccttactccctgtgagactttgcacaagttatttcatttttgtagcctcggttttcctttggtataagtggatataaaaatactgactttgcagggttattgtgtggattagatgagatcaaggcaactggcacggtgaggatcatagggaggcctcagaatgggtttccccactttctccctcccaccaccttctctaactccttcaagttagtactttaggtcagaagcctcagaaaagaatggaaacatagttaaaagtggtagaggacacatgcttgggggaaacgattttagatattctatattcggttgggaaaaaaataagaagaacaggagagaaaaagcaataatctgcttaacatatctcatcattattggtaaatttttagagactattgttactatctgacattgtaaaatttcgctgacaaggaagaatgcaaactcatagctttccctctgtggctttgcctcacgtgttcaaagacactagcaatactggaacacaaggacaattcctaaaagaacgctggcctgcagctatcattcactaaattaagacacaaaacaccacactcatgagcatctcacgtagagaggttttaaaaatgtagccatatgctttcaacttttagaatccacaatgataaacttttcaccaaataccttttgcttctctgaatgtatgacccattatgtaagaacacaatttttcctacgacctttaggaaaaatacggtcaaaaagtatctaacagcctatagcatatgtttgtgtatatacagagacacatatacacttactgttttcttatagaaatattgacatgaaaactatttttctaaagaagaatgctctgtggaggtagtatggtttagtggaaactgtgatgttactagaacgaaaagctattggtccaggccaaatcactaccattggtaggctgtggatacccagatacctcttagtttcctttaagcctgtttctttgcctttcagttgaggatgataacacctttcctgcttatctcataaattttctgagaatcaaatgagataaacatactttgtaaacccagggcagctataccacaaatgtcacatagagtttggttaaagcttagatcatagggtggcgggtaaaatcttccaaatgggctccattcccaacttcaaaatgtactagttagttttgggaccctgggcaagttactagcctctcagtcattattgacttctctggaggcaacaatgaaattttccccagatgattgttttgaggtttaaacgaaataatgtaagcctaggccttgctatacactatttatcatcatgtattttttttaaaccatcattatcaccattattaaacactacataatctttttattctgcaacagtggctttttaagcaagtctcatttcctcttctccggccccagctcttctttcctaagttgtggtttaacgctccccttctttttcttttcgtcttcaataaatttcccaaacctaagctacactatttatctgttccttagaattttagttatcaccagcatacaaatgaccctacctgtcaaactccggagccttgcccattaatacaacattacatagtgaattttctccaggtcatctctgatcagataacccactgtcaaataaaatgaaatattattttggaaaactatttttcttctacctccccccttatgctaaactctctagtttcaaaagaacacgattctccagtatccatgttcataattttcctaactttgactttgtcttcatatatataattccacaaatcttcccttctattctgcttcctacacagtgaaggttttagtcaacgctctgctcatctgtcaatagtcctgcttatatcccttccttctctactgactctgaattctgggctcagagctgcttcactcaacgtgcatgttggctgagccacagtcagctggcatgggttagctgccacactaggcactgaagatgcaatgaccgggaaggcagcctttctgccctcaagaagctgacagtctagaaggagtatagaccaaaaacacttatttatccattagtgtgatggggaaaacgcgggtttccagagaagcaccaaaggggacaacaaagctataactgaggggtcagagatggtacagaagaatcctgaaaaacatatagtcatggaaaggagtggggtgggaggaagtggcaggcaaagcaagggatacacgcaaaagtgtggaggccaactggggaatgcaagcagtggagtgtcgctggaaatacatccaaaccggagtctctttatatactactttaagctttcggctaaagagacactttccaatctatcatctttcctgatttttgaaagattctaagtatttcctaggaacttaaaactgaacttactaaaggaatttctattttgaaggtggctttttttctgtgaaactgatttatggaaaagaagatttaagaaacatatctttagaaaataatttccagtaagttttaattgtatctgatcaatatgctatgtttttaaatggaaactttgttctctatgatagatatacaacacacatgtctgtagacttttttccccctgagactattttgtttatataaataaaagagaccagaagcaggggcagtatttattttttaaaagaaagaaagaaagcttgttgaaagctcagaaaaaaaaatggcctgcaggtaaaaaaaaaaaaagacattaaagaaatctcaaagcaataacaaaaaccttcaaaaatacaataaatagaacaaagcataaaactttgtgacaaaataaaaaatccttttctgtaaaaataaaagtcatctattaaaaacataaaatttgcccaagtccataaagtctgaaggtcaacaacaatctagaaataactggaactaaaacaaaacttcatggaacacttataatgaacttcaaacagtacttaaaatgtacagaaaatgcagggaaaataagtaaacataatttcttgggaaatagacgtattttcatgaggcaaatcatgccttattgatcaactaaagtactgagcaagaataaataaatacatgaactaggagaaatacatagacataatttatttggacttgcaaatccgaggttagtaaagtctcattcactgttagtttaaaatttgagttacggtggaattgcagcaaatgaggagtgatggatgtgaaaataactaagggacatctggagatgggacacaaaggaaaatgattatctggtgaatctctgaaagcaagagggtctctcacagaatcctaaccaatgtttctatgacactgtataaaaatatataaatgcccagaaagttgatgcatacattgacttcaattttttcttagtgataaatattgcattaaaacaaattcaaccagaaaattgagttctacagaactactctattttggttattaatcttaaatattttaatacatttagctaataatatgaaataaaatctaaaataggaaactgctataaaatattaaacattgttatttaaattattttgacattttacatattgaaacctactgtatgaatctgcaataatgaaatgtacagatcttcaagtagaacaaagcatgctattgaccagtttataatgtaatatagatgtggataatagttaaacttttgaagttgatttgtgaataaatggtcactacaatatttgaaagaactcatatatgagaagttttatcatataagatcctataatgtggttaagtgtttataaagctacagcaaacttcatgggctttttgaatgctttcaactttatgacttactttctcaaattatttttcaacattttaatctactagaattttatgctggaattccatagataacttgatgggtaagtaatcaaattcagaagcaagaacagtcagagtacaataagactttgtcattttcaagaagttaaggtgctctgaaattgataaccagataaaagggctctatggctagtttgtactcacttgattcagtttaacattcctggagagtggcagtagtcgatggaaagagtgccaatagaaacattagtcccatgcatcttacttctgtgccaactatgggcaacttgacaatgaataaattgtttcatttatacatttaatttactaattctatgaagcaatacaaaatattaccactgcctgaaaaatcaatctaaaaaagttaaccaataaagagagagacagatactgccaatagattctttaaccacacaagtggtgtttcaaatcaaccacatgagccaagattacactcctctaagaggagacatgtaatagaaacatatacttacgattctaacatttaaaagaattcagtcattatttgttaatgatgtaaataaacacatacaaagcatacaactttccttactcatgaaaataattgtaacacacagcacgatgactgaacatttacatttgcattataagttatatcttccctatttcactcatttattcagtaagtaaatatttactgtatgtccattaactgccaatcacagtactaaaagtttaagagaaaggtcccctgtggaactgcaagcagtgaaaatcaaatgcagaccttctgtggcaaacaagaattctaccacttaaccgtttataaccagaagagtgctctctgcttctactttgaaatacaatttaaattctaagtgacaaatttgtttaaatatgttaaatgtatttctcaaattctgatttagtcacactgaaataaattatagaatatctattttataggttcttcacttagtaaacattacggaatgttgcaaaaaatgtagatatgagcacttgtgatatgttcactgagtttctatttataatccatccattgccccaagcctttttttctggtttttaaatatcctcctgcatcccagataagttggtttggtgagaatttaacaaaataaagatcccactcagtcacgatgtttcctgttatgtctaagtgtaatgtactctaaatatttggtggtagcacatacaaattgtgagttactcctgtggagggtgggggagagacacgaaagttacagggggtaaaccagatggctgagcagtagtacagactggataataatatcctagcatgaagaaacttaagtgaaaggaaacaaaagcaaggtgaatagattacatacacattatctaaagcatcctccctccaaatcattttaaatagaattgctgactttaatagctctaaatgaaaaaaacaaaaaagtcaggaagatattgaatattctgcaggcccatttcactccaatctcctccctccatcctcatgtccctccgctctctcacttcatagacactggctttctttctgcttcactaaaatcctgtcttgttgctgtctcaggtgccttagaagtgaagtcacctctggggtagtctggctccatctcattcagggcactatctcctccttggaatggattgccctaaccagcccatcagaaagagcctcttctgcccccttctggttgctgtctttcatcacactgaagccaacatttatttatatatttagctgtttatattagaatgtaagcttcctgggagcagaggctctgtctgatctgtccacaccaatggccctagtttttagactagtgcctatcacacaataagaatgaaggaaacaaagaactaagcacagaaaaacattgaccctgacgcatcttatttgcaataaaacaaaataaatatttgtatgcagaaggaattaaaacgggtgaatctccaaaatttcctgagcaacaagaacaatacatagaaatcgatagttaggactcactatttataatttaagatgcaaaaatctcatcattctttacattgttcactgtgtcatttactaaacagagctttcactggatcaccataaacagcaatcttccttaccacatttcctccatatagtcttagtgtctttaattatgcattcttctactactggactttttagaagccaaaaccttgaagctgagagttgtatataaaaaagtgttgtatagcaaaattaaaatggcccaatgatagcataaacaacaattacatttaaaatggtagcgtactattagatcaaaccatttaaaatcgacagggtttttttgtaggtaaaaatggtcaaatattggcaatttcctatggttaaaattaatattctcatgtgtcaaacacagcaaaaatgtactactgataagaagttcctacactaattttcactttagtgtgtctctcttttcccaaaacaggcaaagacagatgaagtgctatgcccatgttaaatatccaagccacgttaattcatgcctggattaatttctgatctcatattgacatcttgtgtaacagttggacaaattagaaaatatcctgaagtttcttacagcagattataattcatggcagaaaagcatccaatttgcgagaccctttgtgatgtagatttattgatattaaatttggaccatgtcactgaaatgacaactcatgatgtattaagaggtatgaagtaggatcaaggaagaccaaaaatgagccaagagaggatggttctgaggccgagtggttaagttcgtgagctccgcttcagtggcccagggtttcaccggttccaatgctgggcgcgcggacatggcactgctcatcaggtcacgctgaggccgcgtcccacgtatcacaactagaaggacccacaacgaaaatatatacaactttgtactgggggtctttggggagaaaaaggaaaaataaaatcttaaaaaaaaataagccaagaaacgacctttgaaatatgactatttcctcatgacaaatttcaggggcagctgaaacacattttgacggcattctatcctcgaatccattaatatcactctgaaaggattcctgtagatttctgatgagtgtaggctgaataatctgacaaaaatgaacatgaaaccaaagcaaagatgggctaaataatcctgctgttaaatggggaacaggaagaaggaggaaggcaaaggaagcattccattgggaattataaaaagctgagagcctgttgacatcagagctggatttaataggctgtgtgttattgagtcataagactcttatcagcttctcacaggattcccctcctctcattatattgtaggaataaatctaactatgatgtttttcttagccttttggggaaaaaggaatattgatacttccaatgcaataagcgtctacaaaatatgaatgaaatgattcacagtgcattttaaatggctttataagaaaatttgatccatgctttaaaaaaagttcatcactgaatttaaagctttcatcctaatttcttaatacatgttgctccttttaatgtcaaaaggaatcaacactgaggaggagacatggtgaagagagggacagaggaactcatcatgaatcagctctcttgactgtaggagaaaaataaaatgtttatattttttaaatgttactacaaaatgttccatcagcaagactgggaattctaagtggcatgtgacaatcagatttaagtcactttccaacattctttggatttgaaagctgtgcctgacttcctggaaaaggtaaaaaaagactgatgaatatttcagtataatggcatccagattcatcatcagatttagggaactgaaggttatctccattttaatatctgggctaagtgctggcaatgctgattaaattttcttttaatattctctattctagttccagaagagcaagaacggtggtttagtctgcttgtgctgccataatgaaataccattgactgggcagcttaaacaacaggaaaattttctctcacacttccagaggcggagaagtccaagataagggtgtcagcatggttggtttctggagagagctctatccctgacttgcagatggtggagagagagtgagagcaagctttctgatttctcttctaattcccttatgaacagtcccactcttaagacctcatctaaacctaattacccaccaaggcctcatctccaaatacggtcacactgggggttaagcttcaatatatgaattgacgggaaggggcacaattcagtccatagcaaatggagagagactggatgaaactatgaaaaataataatattcaggaaagttagaaatgagaaaagaacaatatgaaattaagatacagcatggattgtgcagaagacacctataatttaactttgctctgtgttggttgagaaaacttgcttttatattgtgttgacattgctactgggttattagtttctagctgaatcatggcttttgacaattgcctaatgggtgtggaccattcagggtctaagctaaaaattcatacttcacattctcatcatattcaacaatcaaaatatacagatttctctagccgatctaaactttctgggaaaacaaaatttaccggatacctgcaaagttacataaatgtcatcaaatgttttaggagtcggaatactggatcttatcatattttctgtatatgcaatgtaacaaacattattctaagagcattattaacatataatactgataataataataaaaattattgttactaagcattttcaaacagtctaaagccatccttcagctgtaagtctgcatcacctgctggacaaggaaaggcatttttctgggttttatttgtgactcagaagtcatctaacagtataagaactttatctcaggaatgaaggtaagatttcatgtttttcctaactcataggttcaagaaagaaatgagtaagcaagtattctagatgctatacacatctaagggatctctgtgattctgatttttagttactaacacaaaaccattgaatgacatactttaagaattgaaagaatacatcatgactattgttggggatgaaaatggtacctcaaaagtcgccagagtcaattttaaaagaagtatatggagtaataatgattccttagtactttacagcttttcttcccacatttggatacagattgccacaacttctgcagcagaagctattagtgctctgccatgtcacttcagatggacccctctaccgtttttgttgatgcctttccctctccacaactgagagcctcatttccaacagactgctctcagaatgccagaaatgatgttgctgtgcacacactgaacaggaagtgcctgggaactggtgtcctctgatccttaacacctagcctttaaccaacgactgactacacactgcagctccctagtccctgacacaataagtcctggtttgaccgatgatgtccccagcctgtgagactgagcaaatgggatcctctgctaaactctgtttgatatctcatcctttctgctcccacgtcctcctctcctcttagaaacacttcctacagattatttcacataaatctttgtgtcagagtctgagtattccaatctaagacaccttcttgactttcagatctcaatatataatccataagccgggcctagcatctggccattcttcataacagcaaatggtcattcttttaaatatttgatccaacatcaaattgtcaaccattgagcagctctctgctttggttgactttattctcaacctcaaacaatgctgtgttatttcctttctgtctttggccagagagcagccatctttactcctccctagggctaaataaaatctttacgctgatacttattataggctagaacctcattcaccttgatgtctattggtcaagcgtattttttaaatttggcttgcacacacttacatggcttttataatagcattaatataacagttacaatatattataaataatactttgaaatgtctgaataaattttttttttaaagattggcacctgggctaacaactgttgccaatcttttttttttttctgctttatctccccaaaccccccttttacacagttgtatatcttagctgcaggtccttctagttgtgggacgtgggacgccgcctcaacgtggcctggcgagcggtgccatgtccgcgcccaggatccgaaccctgggcagccacagcggagcacgagaacttaaccacttagccacggaggcggccccctgaataaatctttgaataacagagactttccctgtgttctgaaaagaattttaacgagaagcaatgaaacaaactacatttaaaagataacagaagagacctacacactgtttatcaagtcatgctgtggcagcatcccacatacaaaatagaggaagactggcgcaattgttagctcagggacaatctttcctaagcaaaaaaaaaagatagaagaaaataataataatggttaacactcttattatactaaccatgtgttgtactaagcaattcccttgtattattttctgctctccacaaccctcagaggtatgtcctattatattccctattttccagaccaggaaactcaagaacagtgctttttagtaacttgcccaaagtcacacagctagtaaatgtagagttgggtttcacaatggaatctgtcccttaaatcactctgctatattgtctctctgcaaaagaagcaaagaaaaaaaagatctcaaccaaaaaattcaacgcaggatggagagggagaagaatctccttaaatttatgattttcaggtttgttcaagatataataactattggtactgcctttgcagttcccctgctcactcttttgtattttactttctcatccctccctccttttcctccctcccttttgctcttcctccttccctcctcatttcttttttttgtacgtttcttatactctgcatcttaaatttctacagctgtaatctacaacccctagttcatagagctctacaaggatggaattagataacgtttatgcaacgcttgacacccaatatgtgttcagtaagtgatggataatatttttagacaaagttgaaggaccacaggggcaaacatagtgcctgatgtagtaactggcataaaaagtactctatcaatatttttgaatgaattaatgaatgaaagactagtcacctggagaaggaaacataaggaagacttccataagcattgtgtgattcccagaactacaaatttgttttaagcctggggccaagttagaattcaggccggtctagcacccacagatgtagtacatggacggagagaccccgaccaaagcctgttgataaatctgtatgaatgggggagaagggggaagtggggttttgtcctgggtaattatttaggaagatggggcaatgaattgtgagcctagtggagaaggatgagcagggaataatttggatattagaggcagtagttattgtttatcattggaattttctgattgaagcgactagtttggccctattttattcaaaggacccatacagacagctgcacagaacccccatgagccatgtttaggtgttatactgagttactttaaagctgtggagtttcccgggattcatataaaggggagacatgggccagaggaaatttctgaaagtttggacctattctaagatgtagaaaactacgtgaggtcgtaaaacaaaaacacaccaaaatcaactcctatttttaacacttaacttcaatacaagtagtatagtaatgcagctgtgtatatatatttgtactatacacacatacacagacatacacaaattttgtttaatccttatccttacagcaacacggccagtacgtgccatcttcccgattttgaggataaaaaactgaatctcagagaggttatctcaactgatttcggttatgcaggtagcaatgagaagagctggggttggtggccagtgctgtctggatctagaattactaccccacactcctttctcagaggaacaactggggccacgtgctccctgaagcctacaggaattttcagtttctctgagtgacttgccaaaattcatttagatagtaatcattaataatagtagtaagtaaataattacaaatagtaaactaataattaatatttattaataatttaataattaactgggcaggtactaaattctactgatgtttattcgacaccaatccttttgcttctgaccactatgccctacagtctcaaagtcacagaggagttatcagatcacagcttaaaatgtcattatatacccagacaacctaacaatcattaaaatactgttcctagagaaaaatgtgtaccaaatgttaaatagaaaaattgcacataaatctttaagacacaaaatgtgggagtttcttttaagttaccagcaaatctgactggatatcaccatggatatagagagacagaaaactaaatacaacatcttacagaaattcacagattttgtaggtctagaagcctctcttcatgtgcatacaggtaggacaaagctaactcaacgagaatggagagaagttcagctgttcagatataaaaatgctacatttagtgattctcagaattttatgccacccatagctatagtatatttggaaaatgtatgagaatgtgaggagttagaaatctttgtgaaagtttcagaatttgtaagagcagagaaaaatcaaatgagtgtgtgtgtgtatgtctctgcatgtgtattcagattctttataaaaataattaaaataatttaaatttaaaattacgaaaatcattagatatgaaaaattacacatacaaaaaaattgtggagcttcctgtgacatttactggcttttaatggttgacttattttctgatattgaataaaaatttgttttctaaggcaacactgcaaatgttactatattgcactatttacaaatgttttgaaattgaaggtgtttcagaacacttccctatcaagatggagcaacattgtgagtcacaatggtgccatctactgggaagccactgaagtatgaaaacagctaataacctggtatgcatttaatggaaacagaaagaaatatattctatattcttttcaaaaagaaattccattaattagttatttacttgaggcagaaataagagaaagtaattttttaaattaacatataattactaaaacttaataattttaattaataattaaaagcaaatttcaatatgtgacagcttggagaacttgttctgaaggccaatatggagttacttcagaaattcacggcatgtaaaaagtctttgctgtcttagtttgtgcaacacataatatcaggtttaagttagtgaaatcatcttcaagctttcactactgtttttcaaacgatcaccagacatcttatatcaaaaggaaactaaatattcaatgtatcccatgatccatgatttaactgttaccctcaacttatgactagacttttggaataagaatgatggcaatatgttgcattactgaattttcagccatatataatagagaaaaatattttcttacatggatatatccataaaatgacagatagcaagtctaaattaaccatgtgtgttttatatactttgtaaatttactacaatactttttgattcatctcatttctatcatcacccagaacttttctggaccactttctactatgcgtaacttcagagaattaaaactaacaacagcccaagggataaaatatgctcctgtcagataaacgatgtttaagctgttatttatttggctttatatgtactgattcatccattcttacactaattcaacaatattcatttcaaactccactgtgtgccaaacattgagttaagatggaaaatgtctctgtccctaccagtagtacattctagtgtaggagagacaaaacaaacacttaagatcacatagtgaaaagtgctggaaatttaataaggtgcaggataaagagttaccatgccaaggttggggggggggtggtggaaggaaagtatgtgcagtttaggataagaggattagagaaggcactagaggaggtgatttttgtgcctaccaaagtgatgagaagaaggatgctgtgtgaggatctggaacaagagcactgaaggtagaggaaaaagcacatataaagtcttgaagtgggagaaagctgggcagttaagaagacagctctcatgttattaatagaggatgagagtggtaggaaatatgttagaagaggaagtgggagccctatctccaaagcatgaggacaaagataaaaatagatcaacaaacaagaaacatagccagtaagtaggaagggaattaggatgagtcaagcaacacaataggcctctatatacatcatttctttttaaatcttcacgttcaccatatgtgatagatataatcatcctgattgtaaagacaagataatggagggcaaggtgaagtaatttcctcaacgtctccttgactagcaaagaggaaagctcagatctgaattcaaggctctattctgtttccatttgctcatgtaaccatatgcaaacttgtcacatttaagagaagaaaagactctataaaagtttaaatgattggcatggaggaatttcctgtgtctggaagaacatagaaggcaaatcagatacattcaagatcaggctcaacttgtttaactgaacaagaaaaatttccaaataagtctcatgtgaattgaatgaagaactgaatgaaaaacttgttgaacaggaattgtattttcctcttgtcatcagaacaattttgctcattcttaaatgtcttaattgtcttaaagcttgtgtccaacttgaataatgggatttatagtcttataaaaaacataccagaacgagttttattaaaacaaatagcactttaaaattaattttaacattaaaagttaaatgagggggtgatattattttgttcttcatttgtaaatattttcaaaaaaccactttcctcggtatactagaattattatacaagcgaaggtattataaactgaattgtgccccctgttcaatgttaaagccctaactctcactgtgactgcatttggtgatagggcctttagggaggtagttaaggttaaacgaagtcataagagtggggctgtaatcctaacaggactggtgtccttacaagaagaggaagagactccagctctctctctttctcaccccttgcgtgcgcacagaggaaaggctacgtgaggacacagtgagaagacaactctctgcaagccacggagggagaccttactagaaaccaacctgctgacaccttgatcttagacttccagcctcctgaactatgagaaaataaatttctgttgtttacgcccccagtctgtggtattttgttatagcagccctagcagactaatacagaaacaataacaataacacattcaagagttacacttttaacacataagcttcatgcttcttttcccaaagatacagaaacagaaagtgagaacttaacaaacaaatgtctaaataacagggccaggatagaaggtaaaattgactgattttaataatgtatcttcattcacttgagcgtactatgtttctggaactggagataagaatgtaataaataactgcaattaaaaaataaataaataaataaaaagaatttaataaaaccagacccctacccataaaatgtttataatctacccttcttgaacataatttcacctatctttgatacataagaatataacaaaaaaatcatgtgagtaaaatggttaatttctttgagcctcagttacttcatctgtaaaatgagaatacagaatcactctacatatgaactaccaaggttcaaactttcatacttcatgggaagagtgcctcgaccctattttcccctaaaagatggcaatagctataactgtaataaagtaacttaggactttcaaataaataggcttatttataaattgctttacagattttaccctattcacaaagcttctgcaactatacctatggaaaagattaaatgtggtaacatttgaaaagaataaaatttagtaagtgataaaaaatgacacctgctatcattataacagctgaaatacttctaggattaaacacttccttccccccagttacacttcccagcattctgaatatttacaaagacttttcatgatctcaaatgagatatttctttctcccactgtacccttacagacattcattccctgaaagtattccaactttattatgtcgaccctcgatcaagtctatattatcataaccacccaaaatataatatataattaaaaaatcatctctagtttgggtaatcaagaacagcttccttagatgccaaaaatgttagttgttcaagtacaaaaatatttagtcaaaattcataagtttccgagacctgtaagacatcattaatgtaccaaaatatgcattaaaggagtacaaaaagcagaggagagaaggaaaagggaagaaagaatattaaagaaataatggccaaaaatttatgaaaaacattaatccatacatccaagaaactcaacaaactccatgtagaataaaatgaaagatgtccacacttagacacattatagttaacctgttgaaagaaaaaagtaaagatccttctgccatatgaggtcacagaaacaagacagccatcgacgaaccaggaagtgggttctcagcaggcactgaatctgccatcaccttgattttggactccccagccttcagaactgtgataaattaatgtttgttgttttaagaagaagaaaaaaagcaagagagaattttgaaagcatcccccccaaaactaagactcatcatatacaagggatgttcaataagattaacagtttacttctcatctaaaactatagaggatagaaggcaataggatgacatattcaaaattctgaggaaaaaaaagatatcaaccaagagttatactcagcataactatctttcaaaaattgagggagaaactaagacatttgcagatttaaaaaaaataaaaagcctgagaaaatttgttgctagccaatctgctctacagaaaacactacgagtcattcaagctgaaataaaaggatgctaaacagtaactcaaatacacaggaagaaataaagagctacataggtaaatacaaaagaaagtataaatgtttctttgtttgtaactcttttcttctatctaatttagaagacaactgcatgaagccaactgtcttgatgggcctataatgtgtaaagatgtaatttgtatgacaataataacataaagaggttgggaggaaataaaactatactggaacaaagttttgtatattattgaaatcaagttggtattttgttatattgtattttttatatattgttataagttaagatggtaattgtaacccatagggctgcaactaagaaaataacaaagcaaacaaacataaaagcttaaaagacacaaataaagaactaaaattgtacactataaaatgcatattttatacaaaagaaggccagttgaataataggagaaaaaatataacacatacagaaaacaaattgcaaaatgagagagatgaatcctaccttatcagtaattgattacactaaagtaaatggaataaacattgaaatcaaaaggcagagattcacaggatggaaaaacaaaacaaaaacatgacacaagtatataaagttactatgtacaactatataaagatatataaaaataaagaccagattcaaaaacacaaatgagttaaaagtaaaaagatggaaaaatagacaccatggaaacagtattcatataacagctgaagtagctatacaggtaatagaaaaaaatagatattaagacaaaaattgttagtaaaaacagaagaatattttataatgataaaatgatcaatccatcactctcatataagaataacaaacataaacgcacctagcaatagagctccaaaatatatgaagcaaaaacagacagaatcaaagggagaaatagacaattcataaatgaaagttggagacttcaacaccctatttccaattgtggatagaaaacctagatagaagatctttactagacacagagactcaaacaacactataaacttactagaactaacagacatttatagaatattccatccaacaaccaaagagtacacattcatttcacgtacacctggaacgctgtccaggatagactatatgtgagaccttaaaacaactcaataaatttaaaagtagtgaaatcatataaaagtatgttctcttaccacaatggaatgagattagaaaacaataacaaaagaaaatttggggaattcatataaatgtgttaattaaacaacatactcctaaataaccaatggctcaaagaagaataataaaataaattatgaaatactttaaggtgaatgtaaacaaaatcacaacacaataaacaaaacttattagatgcagctaaagcagcacttaaagggaaataaataagtgaagaataccccatgtttgtggattggaaaactctaaatattattaagatactctccaaattgatctatagtttcaaaacaattgctatcataatccaagctggtgtttttgcaggattgacaagctcatgctaaaattcatacataaattcaagggactcagaattactaaaacaatctcgaaaaagaagaacaaaattgtaggattcacacttgccaatttcaaaacttagtaccaaactacagtaattacagtgtggtactggcttagatatagatatatagatcaaagaagaagaaccgacaatatggaaataagcccttacattcatggtcaattgattttcaacaagatctcaagacaattcaaaaggaaaataatagtctttaaaaccagtgtttccaggacaaccgaatactcgcatccaaaagaatgaagctgcacccctacctcacaccatatacaagaattaactcaaatataatcatagatctaaatataagacctaaaactacagaaattctagaaggaaagtaatagtaaatctttgtgagcttgaattaggcaatagtcttttagatatgacaccaagagcacaagtgacaaaagataaacaagataaactggacttcatcaatatgaaaaattttgtgcttcaaaggactctttcaaaaaagtgaaagaaactcacagaatgggaaaacatattttctaatcaaatatctaataaggagcttgtatccagaacatataaagaactcttacaactcaacaataaaaagacaacccaatttaaaagttaaacatagagttaccatatgaaacagcaattccactcttaactatatatctaagagaactgaaaatatatgtccatacaaaatttgtacataaatcttcataacagcatttttcaaaatagctaaaaagtggaaacaattcaaatgttcatcaactgaaggagaataaataaaatgtggtaaatccatataatggaatattatgtggccatgaagtaataagtagtgatacatgccataatacagataaaccttgaaaacattatgctaagtaaaagaagccagaaacaaaaagccatgctttgtataattctatttatatgaaatgtccagaacaggcaaatccataaagacagacagtagattaacagatgctaggggcaaacacagctacagtgagggaagcaggagtggagggtacttgctaatggactcaaggtttctttctggggtgatgaaattgttccaaaattagatagtgctgatgtctgcacaactttatgaatatactaaaaatcactgaatcgtacatgttaaaagcatgcattttacgttatgtgaattctgtctcaatacagcttttatttttttaaaaacattggtaataaagtaacttaccagatcccaagtctctgaaataaaaggacgcttgcatcccaaatagtatttgtttaacaattctgttagtttacagtataaaggtgaaagattttatcacagcagagaaaacaattaatttggatttcctttcacattaaaccagcattgatacaagttgagattaaaaataacaatattatgcaggaaaatatcattggaaaaaatttatctctataaaacgattaatttatattaaattacatctgaattaggagcataaattaattatatgacatacttcttatgttttattcagccatagaacaaatctaatgcataaaagaagtgagactcaaggagtcagtaaatttgctatgcaaaaaaagtttttttacacaaagaaaacgtgcatttatgagttttttaaattacccaaggaatctaaactgaaaaataaccacctttcaagagttacatacaaatgcagacatttatgcgtgtgcatatatatttttttaccatgaggaaaataattgtctgagtcaaaataactgagaatactatcttcctaaacccacatccaaaataatataaaaagagagatcattaatgatggctttcatgattctcattttgaagtagcgtagctaactaccctcccatgctctcctcttaggctgctgccctcccttccccactttcctgcacaggcttacaagtccgcatattaaagagttttctaattcctagtctcaacgttgtacactaaaaccaaacagcttaaaatacactagctcaatcaaccctacatttgcattttcccatctttgtcttttcagaaaatagtgcctaccatgtgccagatgctttgaagtttgatgtagtgtaaaggtcatggtttttggagtaagatctatctgggttcatattcaagatctaccacaaactaatatgtaaatgacctaaaatgagttattctaccttgctgactttgtttatttgactatgaaatgatcataagcacatttacttcctattaagacactgaaaggatataatgcaccaagattctagagagaatggaaatttggatgtgagcagggacccaggagccacactgccaggctttgaattccagctccacctcttgcaagttgtgaagcttttgccaagttacttaacctctctagtgcagtgtcttcaactagatacaaagaaaataagctgccctgtctcacaagtgggttatccagattaaatgaaacaacatgctgggtgcataataattgttgcctactaacactgttaattaatgatgggtatagggaaggtgaatgcacttactccacaagctatttaggcatacaaaaatgagaaagacaattctccaaaacatcaggttttttccaggtgaagtctcaatgggcttcaacaggtccacggaatcctagaaattgtatacaaacacgtataagcacaagtgcctctgggaggtgggaatgggagagggtccattcattttacctgattctccaatgcaacacagaacaaacttaagaagccctaggaattcaaagtttagaaatggatagtattctctcttcttccaccacatatagcataggacaaagagactatataagaaaattgccactttgagcaacgccatgattgcagtgatacaagctctgtttcttcccgagctttccctggttctaccaggcagactgtcatcatgtgccctaggcttcctagacagaggctctctcactgttgactcaatgactataaattgaattctagagtcagaagctgggtttccacattgaatgaaatagaaatggtcttgccccaaaggaatttataatccagtagggctaaacggtggtaaaagtcaagtgcaaaatcatgaaaaatgggaggttggttcagcacagaggatggtccataaactgaaattttagcctggagggaaaaaggaatcagggtcagtctgagaataaagtgacgcttaggctgagatctgggcataaacagcagagaagctagggtctcacagaagctcttctagaacaaaaaacaaaatgtgtaaagttccgaggttcaaacagagaaagtaatacaaataatcgaggcctgaaaagtgttgtttggcatgagcttgcagttgggggttacattctcctggtggatttactctatttttgtatatttctttttattacattttagtgtaataacttctttctatccaacttctttctctcatcaattggttgtgagctctttgagctaggtgtcatgtcatatggatatggtgtctccagctaatcactgagatcgaaaagctgtctgacaagcctctgtgaacaaatgagcaaaacaaaaaaattaacatacaacaaaaaactgtctacacttcatacagaactttataatttacttatatttatcacatactattttgatgcaggtaaagacaagaaataattgctgatcactactgttgccagttttccccagcttttctttatctgtagccccatctcagcatctgcctgaaaagacttgtccttcataagcaccgtcaatcaaagtgctttgttttgtttttgcttttgatcataaaacaggcctttcagagtgcagtagatgtaatctttggtgtctggctctcctccagtggctaagttttcagtggatacgtaggagcttgaactttgcaaagaaacttttggttttcccaagctacttccaagtccagaactcaatcaaaagcttgagaatatggggcacctcatattgtgctgaaatcactgcccattgaactttgctcaaacaaaaaaggtgggcaaacagaaatttcacattctatcactcggtcttctgaagatactttcatgctcctgccaactgagtgtcctgacgttttgctggcttgtttgggactaagctgttgagattccgaaatcaagttctccacgactgcctgccaagtagcaatgctagagtagttgaggagatggcagagccagcgaaagagaagacattatttcgttaaaaccaaacagaaataacaaaagacacacatttctagaatgtttttagttcagttcattcttcgccacttgaaaaaaataagtattttgacccagattacactgactgctgattctgtattaccatatctcagtgcacatgtccgtcgattttcttccacactgatcccttcatctgccttccctaaagacaaaactctaacctaaaacagatattaaaggggaagaccagggactggggaattaaattctagtattgggaagacaggctgacaggctgtgcttttaaaaacatttctcaacacaaaacaagctaccagtgttcatgtaacacattgcatgccttagaaatctcagggcggcaatcctgggatgtttagagacagcggcatcttgggaatatgagccgtgcacatgtgaaccaaatttagaccacacaaaattctgactttaaaagtaataagacttgactgatttgggaaaagaggagatgtttctagtgtaattatcaaaatagtcttttttaataagttgcttacagattcactgttgaattttatagcaatataacatatatacctaaaagtgcgcaagtcataagaatatagctcgataagtttaacaaaatgaacacatccatgcaacaataagaaaacaaaatattcccccttaactcttctcagccatttgtctccctaaaggaaaacacaattgagattcttactgtagttgatcagttttgtctatttttgaactttatataaacaagatttatagaaaagaaatcatgcagtctgtacctcttctgcctgacattcttttgctcattatgtttgtaagagtctatgttgttgtatgcagccatagtttgtttatttgcattgctgtatggtaatccattgtatgaatattctcccatttatttttttgtcacattgttgacagacatttaggttgtttccattggaggttttaaaaatactgctgttatgaatattctggtacacatcttttaaaatgcaaatctatatatttctgtcaagtgtacactttagaagtggaattgctggaccatagagaatggtaagctcagttttagtgaatattacaaaacagttctccaaactggttgcactgatatcccccaatggcaatttttgacagtctcagtagttctatggtccttgtcaacacttggtattatcaatttttttgctttttgtttttaatggctctattagtgggtaagcaatggtatcttactatggttttaattaccattgtcctggtgaataatgatgttcagcattttttaatgtgtttattggccatttgtatattctcattttgaaagtgcatgtccaaaacttttgcccctttctcttttgttttattgggttatctgctttttcttattgatttctaggagttttaaaaaatacataatctttatatgaatcatttagtggttacttacattacaaatacttctctcacttccattcaagaaatggtgtctctgataaagataagtttttaattttaagagttcaatttctcaatcttttcatttaagttttgtctttctgtgtctcattaaaaaaaaaagtgcctaaccacagattctgaaaatattctgatattttcaagaaatattactgtttggcctttcatattttaatcttaaatctacctaaaattaatttttgtgtatatctgatataaggggtgagatacagctgttttcatgtgtaaatccaattgacctaggactatttactgaaaagattaccatttccttatggaaaaagatgagagactaccgtatccacaaggtctgagtcaatgcagaagttacacacatcacatgttattgtccagacatggtcacagggcccaactaactgcaagagcaccaagaacagcaaatgaaatatttgtagctataatattattgttgctgtaatatttgccaagatactaattactcttctatcatatgaaaataaacttaatgaatcattttactattcatgcattgggaagattaaacaataacatattcctttatgaggaagagcccaaatggagattaatttttaagaattggctaaaggcagaaataatttgacaaattggttggtttccaaacactatctctatggaaatttcattgtagccaccatgtactacttagcacatcaatatcatcttccattcgtgctgaatttaataactgtagtctcaatgttttcctgttgataattatgcattaataaagaaaggcatgaaggatggccaaacagatagacaaacatgaagaatattatgtgccagacactctgctttgcattctcacacattttaccacttaaataacaatcacacacaaaaaaattcagcactaccacaaactaatgcaagtgcaaaataaaagtacatatctcattagcaatgacgtctctatcttgcttatatttttagtctaatacaaaataacaacactcacaatgaaaattccatattttcacctttttcctagacttcagaactttgtgagagttctaaaaaaaatgattaagacaattcctctacctcaacagttccacacaaatcttctccaaagggaagcagaacattcttggtagttgaaaggaattttcctatattcttaaactcctagaacacagatttagagtattactttgttactgagtacttgatcattagaggaaaattcaaatttaaagtttgtatggtccaaaataaatcttccaaacttcacgactgtgggtgatttttttcaaatcaccattgacttgttttcaacttccgtattggatgactaccaattattaaaacaaccaacagctctagtatagcaaattaaaatttatataaattttgcacctgcaaaggaccccgactttgagaaggctctgcgaatcaaaagctttgctaacagtacttactcatttgtcaaaaccacagcacactcttacttgataaagtccttccttctttgctaattaagatagtaccaaataaataaataaataaagttacttattcagtcataggcactgaatgttcccagcaggtagtcttttcacaattcaatttccccaatgggaccagaagaggaaatgaaacaacaaattgtactcctgatgaacgaagcagaagctgctattctatggggagtcctgctaggtcaattagttcatcacgctaacagaacagcaatccggaaaccaatgccccaacaacaaaggttcgaaacagtaaagctcagcggcctcttgtaacactgtctcaagtagaaattcctggaaattggtgtgtggtttgccactggcattttaacatgtgatactaagcaaagactcaatgttaagtcaaaataggagtattacggcatcattacatatgtagattaatatacttaccatctacatgtatttttcattaaatggcacttatttgcatttcctgaatcaacttaagcaaaaacagtgtgaaatagaaatattttaaattaatatggtttccttccagttttccaactgtatcttgtccaactccaaaaaataaaatatagttagccctcatttttaacatgctcaactattttaaacatgcatatgtctacaaaacaacgtattttagacccaaatagaatttggtgtgaaaaattattaaatacatcactgtaattaaaataacttagactcctctctcaagaaatttgagaattttatgtgaatgaatatttttgcaatagcaataacatcttgaatttatacactattgagagcttacaaagtagttctacttgtattaccttttttagtatctcaatattttgttgttttaaaactaaaaaaagtatttaacctctaaattaaatccttcaccatgttttaatttaaaaagtgtattctcataatttttccacatttaaatatttatttaaaagtttagaaaacataccaacatgtcatataagaatttaattttttttcatgactcggtggaaatgagtcaatgctattgtccccattttacctgaaagaactgagaatgtaaggtgagaagtggcatttattgatgactgctgaagcttgagtaaatctctggcctctccattctagaccattacctgcattcttgaggtatattaacccagcaatgaataaaccagcatgtgttgaattattctgggtactcaaggtgaattgtgtagggtaggaagtatggaaggatgtgatgaaggaaataaaagctaaatcagttgggcaacgcatatgctaaaactaacatcccatgttattcactgtacacagataaacagttttttcttcagtagaccaataatgctaaattccttgtacttctttaattagatggctatacacagtttataaactgaatatagataactaaaaatgtactccaataacaataataaaaaacaattaataaatatgaaatgtttaagtgctagttttttaaataagaaactgaatgaccattgttttcatatctttgcttttattccaactaacaaatataactagttaaaatagttcaagttttacacagataatttaactctagttttcacttctgacttaaggaatagctgttgctcaattttttcaggtgcaatcaaaacaacttgacaatagcattgggggtagattaagacttggagccttttgagtctctgattcgaattttgggtcccatatcttcccacctacgtgatgctaagcatatgatttactcgctgtgcccatccttcaaggctcatcttcctgtctcttccttttatccactcagttacctccgggatgtttatcatcccattgtcctttggagctcagagtgtccccacctccttcccacttatccctctttccttctaaagtaaaggagaggtccatattcaagaatcagcaatcaaatgagaaaacagtaaaacaaacatttttaaataaaatttgtaaaaatcaaaaataaatctgagtaccatggaaagcacttttaagagccgactgataaaatatcattttaaaaactaatatttattaaatctgataccctaggccctgggtaatgctttacacgcattaacttgttccatcttcactactaacctgtgaaatgagtattattagtatcccattgttagatgaaaaatcgagaagttaattaacttagtcaaagacccacagttagggatcaaaaacagacaaactccattcttagcttctccattgcatcagatgggagaacacagtttagacttgaagctgaatggaatcttttaccttccattctaggtcaaggtcttggaaaagctcacccaagtgtgtctgcagagatatcacagagctgactaagtgaacccacacgtccaactgcatggctgaggacacaggtctgctgaaatgagcaggtcagactaggcacacagaaagaagccttcccagctgaggagcacgcccgtccagctctgcttttcatccagaaacatgcacaagaacattcaccaaacaagaaggcaagcaaatggaggagaaagccagaaggcaggtagtcacaaaggaatcagctagattggctcttgcttttgaggtacaatattctggcttgctagcaaagcctgtttcaacaaacgtctagctctgtccaacatgattaactacagttcttcccatgaactggatggagagacaatgttctttcaacacagtgtccttacagtgataaagacatgatgagatgggagaatcatttacctttaccaatcacttctactttctttctatcaggcctttctgatttcaattccatccttatttagaagatggtaatggatgaagataatgatgacaaagatgaagcccatccagcttgaattttgtggttcatccttgcaaccatatcgtcaccaataacctaacctcacttgcccctttgggcttttgttactcatgccctaaaatccccaaccctgaacgaatccaactacccatcttctctgtacatgcatctttgctgctgactgctcatggaacgatgtcagagttgcttagtatctatagaaaatttatggtcactacctggagcagaatttaccaaagcaaggcaatccgcatgtatgtctagtcagctctctctcatgctctggttcttccactcagaaattctcaactcttctccaactcctgatctatactctactagccttcctcacactcttcagaagctactgccttttattcaccaaggaaatataaggtattaaatggcagctcccttaatgtccagcatctgagtctgtaaacctacctgcttctgcacggtgccctttctctctcccttctgtgctctgcattcctcttaccttcccaggaccctggagatgtctgtcatgaactttctcctctacctttagtcactctctctctattggctccttttcataagtgagtaaatcttacttcccatcttaaaacaaaacaaaaaaaaataaaaaatattctctcaattccctttcctcttccagacagtcacatttgctcatttctttcaaagtcaaacatcaaaaaagagttgttcactctattttttcacttcctgcttattccaatatttcttctactctcactacattacctcacatgctctcactacagttcgtttggcctcaatatccatttcactaaacctaatgtaaaatacttagccctgattttatacttgacccgttagcagtatttcaccctaggggcccgttcgttcccttttcaaaactctcttttctagatatctaaagtatcacgtttccatttttttctctttagctttttggattagttcctccttctttaactgatcatcaaatgctggttgctttttcaggcaccaggtgctcctaggtgctcttctttgttattccatttccttttctccttcataacccaatctatttctacgtctccaatttctatctctatgtttacgactcctagatttatactgacagcctagagctttcctctgcactccagaaccatacacccatatcaacattttccatactccataacagtccagagttaatttgaagagaaaacaagagtctaatgctaaacatataaacttcctcatatccaaacttacacctcatcctatatttcatatctcatttgctcaaatcagaaatttgggaaccatggtacacacagctctttttctacccatcaatcaagtcctaaaattctcgcttctagaggttctgaaatctactaattttcttcattcttccagtcatctttctaggccaagatgttataatctcttctgcataaataaattgcctcctaactggtttctccacatctacctctcccattcaattaattttccccactgtagtcagagtaataatcaaagtaagatttatagggtttgtgcgtatgttcattatatcaaatacacacttcaaaagtatagaatgtgaaaatgaaaagcaacccccaattaagaaaacgcaaatctaacaatctcactttcatgctagccagaaaacaaaaacacaaaccaaaagatttagggtgaatcaagtcactatctttagatagataagaactctgagttctatgccatctggctcctccttcttctctggcctcttgtcacacctgtatttctctacagtatgtacgtacatgtgcattatgtaaactctcatacaccagactctctacctggaacactccctggaacttctcctcaggtagctaaaactttcactctttgatcccagcttactaaagcagttcatttaggatggctcttgtgactcagtaataggaacgatgccctcttataaagtccaatatcaccataacttttcctttatagcattcatttgtttgatataactcctgttcatcaaagcataaggtgcatcaaggcaataacttcatttatcttaagaattgagatcatagtataatgcctgatacatatgaagtacttaaggaacattggttgactgagtccccaaacggaagagtagaggagaaattagattcaagtaatgcatgttaactgtcaagatactatgtgaggtatattttgtataggttttaaatacaatctaatctagtcttaactctatcatcaatttaactgtttcatttagtaaaacagttccacatctaaacctcagtttaagctacctatcatgagaatggcactacataaggataaaatgctattcccactgatgttcatataatggcatggacgctgaaaagcgttggatatagaagtatatgaattatgatgctagcaaacaattacaggacacttagtatgttcaattactcttctgatcactttatgtatattaacctaaacaaaactcgcaactacctagcatttaagtaccattattagcctcattttatagatgcagaaattgaggtcatagagtttggtgatttgcccagggtcactcagcacataaattgcaaaggcaggatttaaacccagactgtctggttccagatttaaggctgaggtgtgagtaccctcttataatattaacccaattaacattcttccataacttgaacaggatagtttttctcaaaccaaatagtataatattaaaaacttacattatgtttcttacttccctccttttataatccagccatagtatgaaaaggacaaagtttaacttccccattaatgaaacatttgatatagagaacacttttcttataatttttttatcatgttggatatcttttatattaatcaggttaacattaagccacatcactttttacaagactgtgcatatgcgacaaagcacatttgtattgtcctaaaattaaccctttatttaatgttctatattttgattcgatgacaactttatgtgtttaccacaagaaaaattttcaattactttaaaatataactaaatcaattcataataccattaaaatttttcattatctaagcgatggatattattgattgatctaaatataaatagaattgaactatagcccggatgttatacaagacataattaaatagacctggttccaggatttctggaaattataattgacagttgatacagatatccacagactagcagaatggaatatatgtataatagcagaattaaaacctagaatcaacattcaaatgaatagcatgctatttatattaggaattggggagtcaaaaaagagtaagcacttgagtaaaaaatatcagagaatattatatggcagttagagaataaagtcctgtgagaaagcatagttgatagaagacagcccaaattaaagtatacaatgcatcccccaaaattctggccataatgttacttctactccttgattttcagtgctattttcaaacactgaattctctgttctccatttcaaatcccaaatcctggaactatttgtaccacctgtctctacttctttacatcccataactcttgaacctacttcagactgtgctgcgaacactcggctggaacactcaaagccaagtgcaaagatcctttctctcatttggcctctccgcagaaagcaaaagaaaaccaacaaaaacctgatttttcttgaaacattcgcctcttcattgttctttcagtctttcctaggtcctctactagctcctctttgttctcactttccaccacacttcttcagggggctcagctactttcatgcaaataactctgtgatgtctcttttcactcagagctttttctcctaagctccatgatcgcatgccaagtgtctcctggccatgtctccatgggcatctcacagatgcctcaaacataatatatcaaaaattgaaatcatcctctaccctctcaactctggtcttttttttcctggagacctatatacataaatgactgcaccacccatacagttatacaagccagaaatttgagtgccacctttgacttctcttcctcgttaatctccacacacagttagttcttgatcacacctgcaataatgtgtccaattctgacaaccacacataataaaaaaataacttggaactgtgcgcaggaggaaagtgggtatatgggaactctctctactctctgttcgatgtttctaaactactctaaaaaattaaaatctattaattaaaacaaaaggaatatacaaaggagagtgccaatggcaagagatttaaaactatttcatataaaaaagagatatacacccatgaaatactcattttcacaaaaaagattaagagacgtcatgataactaccttacaaaattgtagaggaaaaaggaagatgtgttcagcggactccctgaaaacaaagctgcattcaccaggagaaatgacaaagaagcagctttcagattcttataaaagaacaaactatttaaaaaacaaaaaccttcgaaaagaagtgaattactaaatcatttattcaacacagcactttttggtttagaaagtgttttttattttctgttatcctatttaattactacatcaactctgcttctaggtaggaggacaaatattattaccttcaatttatcaataggaaatgaagacagtgagcctcagattattgagtgacttgaccaaaattggtcaggtaggtcccagcataccgcacttaagtaattcatactacacagcattgtcttaccaatagattctctattcctggcttctcccatccacatacaatgttcagaaaatatgagttgaaaaacaaattaataggtcacttaatgcataaatcaagccagagtttaattccagcgctgttaagtgttaacaaagagtcaaatataattaagtgactaataatacggaaaacaaacatacaaaaatgtatacaaaaggtttagaagagagcgataactcgaggtggtttggctagatatatgatattaaaatctgatttatagaatgcgtataatacagagaggacaaaatctattctcaaagtagtctgataaagagcacctttagagggtcctgaactggtctttttatggcatgcctctcccctgggatttaagaaaggtaataagaataaagaagacacaaacaaatgggaagatatctcatgtttgtgtattcaaagacttaacactactaaaatgttcatacttctcaaaatgatctatagattcaaagcaatccttaccaaattccaatggtattctttacaaaaatagaaaaaataactctacaattcatatggaaccacaaaagaccgtgaataaccaaataatcttgagaaagaacaaagcaggagatatcacaactcttgatcttaaaatatattgcaaagctacaataatcaaaagagtattatcctggcataaagaaagacatatagaccagtgaaacagaaataaaaccctttgtatacggtcaactgatcttcaacaagggtaccaagaatatgcaattaggaaattagagcctctttaacaaatggttttgggaaaactggagatccatatgcaaacgaatgaaattggattcttatatcatacataaaatcaactcaaaatggattaaagacttaaacataagacctaaaaccataaaactcctagaagaaaacacaggggaaaggcttcatgacattggtcttggggatggtttcatgaatgtgacaccaaaagccacaggtaacaaaaacaaaagtaaacaagtgggactgtatcaaactaaaaagcttctacatagcaaaggaaacaatcaacagagtgaaaaggcaacctatggaatgggagaaaacatttgcaaaccacatatctgataacgggttaacctccaaaatatataaggaactcctacaaatcaatagcaaaaaaactaaaaacccaattgtctataataattaataacccagtgggctaaggacttgaatagacatttctcaaaaaaagacatacaaatggccaacaggtatattaaaaaatgctcatcatcactaatcagcaggtaaatgcaaatcaaaaccaaaatgagatatcacctcacacctgtcaggatagctattatcaaaaaacaaagataataaatgttggcaaaacactgttcacttcaacactattcacaagagccaagacgtggaagagcccagatgaatggacaaagaaaatgtggtatatacatacaatggaatattattcaggcttcaacaaaaaggaaggaaatcctgatctaggtaacaacgcatatgaaccttgaaaacattatgctaagtgaaatgtcagtcacagaaagacatatactgcaagattccacttatatgaggaatctaaaatacagcagccccccttatccatgattttgctttccatggtttaagttacctgtggtcagtcgtggtctgaaaatattaaatggaacattccagaaataaacaattcataagttttaaattgtgcgctgagtagcctgatgaaatcccacctgggacatgaatcatccctttgtccagcagatccatgctgtataaactccccgcccccgattagtcatttattagccatctgggttatcagatgatcagatcagctgtcacagtatcataatccttgtgttcaggcaatgcttattttactaatatgggccccaaggcacaagagtagtgatgctggcaatttggatatgccaaagagaagttattgttaatctcttactgtgtctaacttataaattaaactttatcgtaggtataaatgtacaggaaaaaaacatagtaaatatagggtttggtactatcggcaatttcaggcatccactgggggtctagggacatatccccctgcagataaggggggacttctagagtcaaattcataggatcaaagagtggaatggtagttgtcaagagctaggaggaagggaaaatggggagttactaatcaatcggcataaagtttcagtcaagtaagatgagtaagttctagagatctactatacaaccttgtacctattatcaacaatactgtattagatacttaaaaatttgttaagagagtacatctcatgttgtgttctccctacaatcaaataagatttaaaaacaagaaagataaaaagattaggtttcacaagaaagagctgcttctcttatctgtacttctcttgcaaaccattaacctctctggtaataataacgcccaggcacaggattgttatgagaatgatataatacgcatgtacaaagaaccaagtatagaacaccacctacttttgtgactaggtgaggggtccacagacaggatggtgcactcagacaacagagtgatcagattctcaagaatggagaaaaatatttgagcattaatgagctgtttgattagcatgccttcttcatttttattcattcattcatgtattcttttaattaaatgagttaataactttaaacagtgtggggaacaaggggctggccccgtggcaaagtggttaagttcgtgcgttccaccttcggcggcccagggtttcaccggttcggatcctgggcgcagacatggcactgctcatcaggccatgttgaggcagcgtcccaaatgccacaactaggaggacccacgactaaagatgtacaactacgtactgaggggactggaggagaaaaagcaggggaaaaaaaagtgtggggaacagtatcttgtacataagacctacatggtatttgttaaatatatcaattcatacataaacatttattaaaataaatacctactgtattcaaggtcagggatctaaaggtagaacaaagccatgatccacttttgtttttattattatatgctttatgccaaattatttcaaaggtgtgtatatggatgtaagaataataaaatatagtttgagagtacttttaaatatttactacaaatagtttaccttcgtggttcatctttcaaaagtatttttttacttatattaattagttatattataacgtttaatcttcaaaaatcaaaacaattcttgcctaggctgtttcaagaattccagcaccatataataaattgcttgaaaaagtgtggggtttcttttcttgttagctttccgctaaaaattttttataattgggatttaatgaaggtaaaggtcaaggtttaacttttgttgttagcattcttctaaaaagtgttttataattgggttttaataaaggtttaaggtcaaggtttaacttatagaatttatattttcaacaaagtttggtctatacgagagcagttaacttgttaaaattttaaaaatgtaatgctctatgttaagagttagcatgcagctatttacaaacggaatataagcattttcatttgcaatctggccaatgatgctaggactatttaaactggccaagcaagagaataaaataatggttcacctctttactgttgctggaatactctgcctaataggtaaattggatcacatcacttatctcctgaaaaaaaaatcccttaaaggccctatgggatttaatccctaggggataaaatctaaaatcttttgatccaggcccttagtcaggttcctgcctatgcatctttaccttcagaaacaccgccccctacaggctcctgcgaaaacagccatctgaatgaagtaggttgcatttccccaaactcatgttctcccatcctccaaatctgtgtgtgtgtcttcttatgttgggatgtgccaacaaagttctcttcctccttcaagtctcagctcaggagttaccttctaactatgttatctaccaaaatactcagttataaatgtttaatgtttacaggatatagagatattgtgatgatgtaattcaaagggcaacatgatcataaacttaagggaaatagatttctatattgtttatctcagagtaaaagatgttcaggacaggtgggtacgaaaatgaaaagcaacgtttctaccagagagtctctaagccatcatggtttactatccaaaaaacccagccaccaccccaccaacaaagccttgagactattatttcatgactggctgtgaactatcaagagatataaagaaaaagaaattactctgctcaagattattgccatcagctactacatactagacctcagtgctttatttacagaactccctacagacaaatgatagaattgcataatgagtatacaaatgccttttcaagaatagatcttgaaaactgtttttataaaaatgccttctggctgaattatggaaaggcagtgtgctgacagtcagaagggacagtaacacacacgggctttgttgatttctaatggattcaatcccgagtagcatgaaaaagagggaagctaaaatactttaggaaggtttggatctctctctccatgtggtcctgtcatgtgaagaatagcaggatatgtgtacagtagtcttctatttaaaagagaacacagtgctttaaaaattcccatttgaatagacaagatcagtaggttgctagagagctgtaatgctacagaacatactcacaggggtaaaaccttgttattttgagacagtaatccaacaaagactgaacagagattttacagaatttcaattttttttaagagaaactttttaataaagttgtgtacccatttctagggaaagataatttttgtcaaaccataaaatgctgggtttatgctgtgaatatttttgaagcttcattttcctcagtagttatatattttcacatttctttttcatgtttttttttcattgaaaaccctttatacctgcctgactttaatccaaggatcattaatacaccatctgaagtagtcaaatgatggcagttctcacacttcctcctgcagtcctcaagaattctcccattgtgcagttgaggctgatgctaatgcaactgaggaaaagtcaccataattataataaaataataccaccacaaccatcttttattaagtcatgctgtgcaaaggcaatctgcataccgatccaagcacaacaggatatgattgattcggccctgctggctgtcccaataaagagtgctgccctcagcccctgtgatcaccaatacaacaaatgttaatgcacgtggcttgcaaggcaaaacagctaatcccagttcagcttgacaagccatgaattgtcagtaatgagcataagctttcaaagtctaaaaaatgatgacgccttcatcctcttatgtaggaagctctggcagaaggaaaagtatgaaaggaggagcagcatgatgaaagcatgcaagcctgaattgtagtgtctagaaacctcataagtcaaatgccttagtcatttattttacatccctagggacacattcacatgttgccagccataagaagtagagtcaagggcccccccccccccaaaagccaaggtggcttcttaaaatcaaccaagagagtgaaaacacaataaaaaatcaaatggggaaggttttaaagattttcaagattcaagagcaaaaataaccaatgggaaaacacttgctaactgtaggtagtaatggcaacactttgcttaccagaagacaaccatacccatacatttggtcagtgcttcccactggccccagaactcattgccaagggtcaggatatggaggggatgggaagcaaagaaatctaatcagtttctgtttgttccatagactttcaaaatggaagaacttagaggaaattcaaactatgagcaagaaagcatttatatgtgtctcttaagtatcggaaataaacatttctcatgctgccaattggcatactatcagtttcacctgaggaacacaggtttgctagtctccactgaactgactggatgatagctcgtatccttagaatcctacactcatctctctgattcagtagctgtttcctcctctaggggtcagcacactagagctgtcaattacacctgttttggacatgttttcataagaagacaaagttgtcttcaaaacaaacaaaagaaagaaaagaagtacatggatgccaagaaatctttactgagtctacctttttaaataacaatactcagaaacctcccctgacaacatgaatcagtttagaaattatcagaacctacaattcggaaagataacaaagtcatcaatcatttactcaaatattctatcatcagtactatacagttgataagtcagaaatcatgttaaaacatatttttaaccacgtgctttaaagtattcagattttcaacaatacggtttcaacgaatgaactgtgtcataaaaattccagcttcagtctaatgtatcagccataaaagcaatttatctgctgaaaaatgcagtcagtttctgtaaagaatgtactttctatgccaaatatgatcttttccacagttacataaacacttgatgcaatgaaattactagcagttgtcttgttggtctccgttcaggtgtatttccctgcctgttacatctccatctcacacactttgtctattgttcaaaagagtaatttcatgcatcaggaataccacgatgcttctgagatgggttatgtgcattgtggctgatgtacctaagaaaactatgagactatcactaataagagaagcctgcagaaccatctgcatggttttataacaagttctgtggttgaatttatatagaaaaaaaattgcaccaacaacaaactaatagagtttacaaaaagcctttttggcctttagaaccaaacagatctttgtgataaaagtaacttgtctggatactccctgaggcacagtgtgttttccatccttaaatagattatttatgggtactataaaattacaattctggaaacaaaattatgtaacatcatgaattctgggaatgtgggatttttgtcaattcacttgaaaattaacttgaaagcaatcaggtactgtattaagaattttgtagcatataattaatgaattttagtaattttcaataaaataacaaaaacaaaagcaccgtttaaggtattttaggactagtgtgattaacttagtatattataaaaacatataagatccttttcaaaacgttcaacaattatgcgtttgaacaataatgagttgatactttcaaagttaagttttaactatacttcctcttaataaattttaatttttaaatgtcaattaaagaagtactagttctaaaggaagaaaaggacaaaaacctacaccagttcattcttcaatgcagaagtaagcctgcagtgctatggtaactttgtgatgtatttttcaaaagacttttcaactcaacctactaggtggttgtaggaactcaatccatgccttggaacccctctgatagaagatatcaaagcctatacaacttgcatctgaacactatctttgtatcatttttcctatagttcacctcgaagtattagcctggaaaattctgtgattgtatttgccacaccacattagtatttgatatttaaagatgcttattggtgaaggtaagatcaatagtgccaattattcaatgcattgcaggtttcctctccaaatattacttatccacagaattttgcatttctatcagacagctgactttccacttaattacaatagtgaggttacacttcagaataatgaattctgatcaagcaagatttgcctggtctataaaagtgatctaagtttctggcagggagttatattggggttatatgctcacagcttttcctgatggaaaacatgatcaaagaggtttggggaccccaggagagtttgaattctaacttcttactaagcaaaacttcatttatctgattgtacaaagctagctggtgtttttagatgcaaagaatagaactctgggtaatttaagcaggaagggaatttactggaagactgaagaaccaagttcataagatggtaagaacagatacttaagtttcatagaaaaatcaggtgtccataagtgtctgatgaggaagtctctactgctgaacactgagaagtggacaaggctgcaggcaccactggctttgctgctactggttgctgggggattctacagccaccgtctcactagaataaactttcctatacctccttcttaacatctgttctacattcaaaataccatatgggaatatctaataggctgcaaataaggcctgtgctcacctctggttgctagagcttcaaaaatgtgagtctctggacctttctacttctgttttgaaaaatgtagcagttaggatgagctagattataacaacagaacagtctccaaatctcagtgattaaaaaaaatctttctcacactctttacatgccccatttttcatcagctgaggactctgctacatgctgtgttcatttcaacggagacagccacttgatccagctgtcacgccagaaagagtcctagaacagtgatcatcaaagtggaatccagggaaacctggggatcggcaagttcaagcctattttcataatcatattaagatgttatttgcctgtttttttttcattttgatgatatagaaactcatctttaataataataattacaataatatattgatgatggtaataataccccataataataattaaaataatatattaatgatgataataatacctcttatggcaatttatagttataaattatactcacagaaatgatctcatttgattacaatattcttgaaaggtaagttattaatagctatctaccatacatacatacgcacacacacacacaaactttaaagacaaggagactaagaacagatatttaaggttcaaattataatgagctaactatctttttttaaactttcattttgcatgtatctccacaatacttttaatgcttctcttctttctgggaattcacctctctctcatttcagcctggtgtttctgtcaacaacttaaatgtattttaaattttatctcagaagtcacagcctttcattgggttatttgttttcttatttttgagttttgcaaatttttttatacattctgggtacaagttcattatcagatataagacttgcaaatattttctcctagtctgtggcttgtcttttccttctcttaacagtgttattcaaagactagtaattttaatttttaataaagtccaatatttcaatttggtcttttaggactgtacttttggtatcacttgccttcagtctttcgccagtaagtatgatgttctatgtgagtttttcatagattccgtttatcagcttgaggaagttcccttttcttcttagtttcatgaaggttttatcaggaaagaatgtaggattttgtcaaatgttttttctacaagtatagagatgaacatacggtttttcttttttagtttgttactatgatgaattacattgattttttgtggggcggggtggcttaaaacaacacaaacttacgttacagcctgtgagtctaaagtccagtgaacttcaagtccctcagggttgaaatcagtgtcagtagagctaaatttcattttagaggcactaggggagaatgcacttccaggtttattcaggttgttggcagaattgagttacaagtggttctagggctgtgtcaggtaggcgctgcccttggctcctagaggcctctctctggaacttgcacatgggccactgcatcttgaacaagcaatggcacatccattcttgctcatgctgccacatctctctgcctcctcttcttctgctgtgcctcgtaatttccttttacactctcattttcttactaattaatgtacagtggagttttctagaagctacatgacactgtgatatttcaacagattgaatgcagaagctgatatgagcatctagctatcttcttttcagccaaaaattaagaagatttgcaaaaatgtaaaacaatgctattctcttcattgttttttagtagaaacatattattttaaatgatttaatacatattttaaaaatttctgtttcaagttccaatatagtaaatgtcactataacatatagtatggatataaatacacagaacatacaggtataaccaacacaaactaaatctttttaaaattctcaaaactttttaagagtgccaagggtcctgaaacaaaaaaaattttaaaggtttaagaacagctctactgaatctcacaccagcagtgagatgatctggctcagaagacctcatcactgctgctcatatctgactggccggaagtagtaatggacccatcctaccagaaggccgccaggaagttcaatcctgtaaggcagagagctggaaagactaagagaacattgacgactagtgcagaaggcacaccctgcctccaccaagactcactttttcccccaaagggaaagtatacaagaggttgggaagctaaaactataacaaaagcccgccacatactctgtgggctcatctgaatgtgcttcactattcagaaaaggctaccgttcagttcctccaattagaacaaagtacttaaaattgtctgcatacaagggaggtcatgatgtatcactaacacgccagatacttgtctactattttggtccttgtaggtgatgaatcccagattatgctcttaaacatttctattttcacatttccagattatgcctgacatcaatctatcccaatatctgttaaggagagattggattgtatgatacatataaatagttctcaataaatcaatgtctaagaactcaagaacaaatttttgatactatgtttaaaaatggaaaaatgaggtttgcacatcatacttctaactggttttattgcaagctcatcattatccatatttcaataagtttaattcaatttgtagaacttcaaatgttgcttaatgaagaaatattttctgagttattcatgtttgggatggtttgtaaagatacgtgttgcttaacacaaaaataaccctttatcaaagaaacaggtttagcttaactaatatttatgtctcagataaagtcataaacattgtattattgaggttaatcaacagtatggccagtgaaaaattattagttcctattgttgtcagatttcttgtctaccatttttttttttttttttttaggaagattagccctgagctaactactgccagtcgtcctcttttttgctggggaagcctggccctgagctaacatccatgcccatcttcctctaccttatatgtgggacacctaccacagcatggatttgcccagcggtgccatgtccacacccgtgatctgtaccagcgaatcccaggccgccgagaagcggaacatgcgaacttaatcactgcgccaccaggccagcccctcttgcttacttttaagtggctagtttcaattggctctgtgtgggaaaatcaaaaaattcagcataatagaattatagtcaaaaagagtcaacaagctttgagtaaagcctgaattattctcctatgagtcaatgcatgagttttcatacacttagaatacatcatatacatgatggcatttaggagggaggtgaaagtatttttttggttaaatctttacttcgtggatttgggctatgctataaagagctgaaattaagtgataagtagtttgtagataaattagatgttactaaatttgagaagatttttatacaattgtgacccaaaaaatcacaaaaggatatacacatagatacatagttataagcaaaacttgcagaaggaacacaaagaaactatatggttttatttctgctaagacaagaactgtgttcatttttgttctacaaaaagaacatttacttcacaagcacaatgcaatgaccagaatcacagaaactataatcagggatcccgaactttaagtgagtagttctgaagtgcctgtaacatgctgttgggtttgcaaacatctcagtgaatatttcgtaagaccacgaagggtagacgcagtaactgtctttatttcacacatgaaaaaaattgaggcttagcgagtgaaggtccagatctgactgcgaagcctgtatgatgaattgctcactgtaccctcctgcctgtcctttcatgtgtgccagtcccagtgaccttggccaagatatttaacttcggtgggcctcactgacttattcatccctccaccaatgcattcattaatttcttcatgaattcattcaacaaatatttactcactacctacaaagagccactcactggacaagttgctgaaaagattcatctgtaaaaagaaaaggttaaagtgtctgttatagggatcaaatgaaataatgtactaaagagattgtatattctaaaacgccagtgaagctacaactatttctgataagaatcaccatggatataatgccgtgattgcgcttctgctacatgattttgtcacacctgtccggaccagggacaattgttcccaaagcaactccttaccctgggcaatgaattgatatgatagaaaaactctcctcagtggcatcctctatcttggagaatgactccctcagtcaatccaatcctgtctcagggaggcagaacgtgggatgtccaaaaggagattctcagaaagtaggagcagaagcagcagacaggctagcagaatgactctaaagactccaaaagttctttcgcattctgactattattccaatttttttttaaagattttattttttcctttgtctccccaaggccccccagtacatagttgtatattcttcattgtgggtccttctagttgtggcatgtgggacgctgcctcagcgtggtttgatgagcagtgccatgtctgcgcccagaattcgaaccaacgacacagggggccgcctgcagcggagcgtgcgaacttaaccactcggccacggggccagcccccattattccaatttttgatacctatctagataaccatgaaaatattttttgctccacagccagaacacatctcaggctttaagatcttttaggtaacataataacatattctaacttgccttcaaaactgtaaagcatatacataggaaatttctcaccaccattataattactaatacttgccgctacttggccagaagtcattaaatactggaagatttaaacttctggctaggatttactgatcttcttatgtggctatattccaggattacctttcaatggttgctttctaaaacaacattaagctcttttctcggtttactttaatccatttatcagcccataactctgaaccaattactgaaaaatatccttagcgacacttctgtcagtataattgttaagatttatccgaagatagatttttatatcttatttttagtcagctttaaagaagcatagtttatgagaaataaaattaattttaagtatacgattcagagttttaacaaatatatgcagtcatgtaaccagtaaaccgatcatgatacagaattactccatcaccccaaaaagtccctcatgcccacgggctgtcaatctctcccccatccctcaacttctggcaaccactcatctgtttctatgattataatctggcctctcctggaatattgcataaatgaaattgccgtgtggagtcttttgtatctagcgtctttcacttagcataaagctttagagagttgctacaggaatcaatagtttggtcctttttattgctgagtagtagtattccactgtaaatgtatcccaaatttgttaaaccagagtgatagctgatgaacaatgagttcttttctgctatttggctgttatttaaaaagctactctgaatatttacatacaaactttgtgtggacgaaaatttcatttctcttggaaaaatatccaagagtctaaggcaatacacatactgcaaccttgacaaattcacttgctagattagtttttttgatgattcttcaagattttctataaaaacaatactgttagagagttgtgcttcttccttaccaagctgtatgatttttttttagacttactggactacctaggatattctaaacaatgtcaaataggagtggtgggagtggacatacttgctttgctcctgaatttggaggaaaagcatttaccacattggaggatgttaactacgggtttgtcaatgatgccattcatcagtttgaacaagttctgttctatttctagtttgttgagagattttatcatgaatgagtgctgaattttgtcaaacattttctctttttaaaaaatctgttaatataccgaattgtaatgactggtttttcaaatgttaaagcaacctcgcatttctgggataaacctcacctggttataatgcattaccctttttatttaccactactaattcactaaatttttgaaaataaattttgtacctacgtaatgaaggacactagattgcagttttcttttttttaataacaaaattgtctgattttgttatcatagaacgtgaaagtattctctcctcctccattttctggcaaagtctatgtatatttgacattatttcttgataaagattggtagaattcaccagtgaagacatctggccttggagttttttatttgttttttgtcaggtggaaaacatttttgtttccaatttttaatagagtttaatttttagaacagttttaggttcacagtaaaactgagcagaagatacagaaatttcccacatacctcttgccctcacacatgcacagtcttcagtttcctcattctgcaagtcttgaaaaaaacagttaagatcacacattgatttcactggtctgacacattgtgtcccctgcctctcaatctaaggttcacctcaagggccttggtggccatggattggtttctgctcccaattcatttattctgtgatgtagtatggcggtacctggctatcatatctccccatgtcctcaaagaggagatatgatgtctatagattttgaagcaaacacatttgtatggatccttatacattgtcaacaacatcctggaaatctggtctacctactaggacttgaactcctgtataagtgaggaactcactacctcacaagcagctcttacatttaaagtgttcccatcattagtcagttcttctgtgggaggacatataagtccagagaggccgaataaggagtttatgatcagattgcaatgtgcaatcaacaccaaaatccaagtgatctgatttcaagtgtcctgtaagctttttctttgcctttcatggatcctttgttagaattcttcctggcaggggagattagggctcattattattaatttataatactaataatacttcttgctttcttgcttaatacttacaggagtaaatatttccatcatttcaggaagtacatgcatttgtacatcattagaaggttttttaaattccatgttaaatttcttaatagatacattcgctttcagtgggcttcgtcgattgcacctgcgaggctataaagtattcatgtactcaatgtagattaaattttgatcacttttttccatttgagaatgatttagacattttaagaactaatctgctggagcaaagacttggcattttattcaagatttgttaatatgtttatctgttgcttcttaccctttttccttcactcagtcatataatgtatattttttgagcaattaagttcataggatacagtattgaacactctctccccttctgaagcttatggtcaagtgaagaatgaaaataggtagatagattaagatttcttaaattggctaaaaggaaagcaaattatttggagatttctcatacttttaactatcatatacataagacagtagaaaaaactaatgcataggaggagattttcaccatcttttcagcattaaaagtcaaattaaaatttggataactgaatgatacatcaaaatgccaatttccaaagtcacactttctacaacaaaattatctcatgttaaaaaattgtagcacactcttctcaaagagtgttccagggacctctaggggtcgctgagacatttctcagtgggtccctgaggtcaaaactattttcataaaaatactaagatgtcgtggctttttcattctcactctcacgagtagagcttccggtaggctacacgttgtgtgatattacaacagtctgaatacagaagtatgtagatgaatccaggtgatcttctaataagccaggaactaaagaaatttgcaaaaatgtaaaatgataatgttctcctcactatttttgttttgaaaaatacgttcttttataattatatgctaatatttaatgggcttattgtttttaaaaaatataaaagaagtatcttaacattttctattttaacttataaaatgacaaatatatgtatatattatatatatacatatgtaatccacataatcacaagctctttgtggtcctcaataagttctaagagtttaaagagatcctgagacctaaaagttgaagacagtgatataagatataaaaaatgacaacatgtatgactctttaatccttgtcactgtcacgtttctacctcagaagtctactaagtataaaattaaaatctaaaattagacccctttctgcattaatatgcaaatgttattgtaatgactgggtcattaaaaatatgaaaatataaactcatgaatttaaagagtcctatagaatctcagaagtcaacattttcattttactgatgagcaagcaaaggccaagattgattatacacttgtcataaatcaaacagctagttagtgcaaaactaaatcaagaatctagttctaccaaccaacctttgctcttcagtgttatgacttaaataaaaatgctctgttattcaaaaccaactaaatcatcatattaaaatatttttaaaattgtcagcattttcccaggtctctatttatatagcagggaaaagaaaatcactgaaaaacatttaggcaacactgtacatgctcattgttatagaagctgcatattttagttattcatcagtcttcttttgtacactttctaccaccatatacagtgagagacaacagaacttgaaggacaaaactcctcaaaatgactgctgaagctactcttccttcaacaactacacaatggatggacatgtgtcctactattgacttacttaaaatctgaacgagaaaaacatgataagcaacataaaaatggtctagttccccaagctaaaaattttagaaatcacactaattgtgactaattgtttaacatctacttacacacagacacaccagccctgtaacaacaaacatttctccatgttttattgttccattcttcctaactagaatgtcaatgatcccataagaaaaaaaaaatagcaacagaaaaaaaggctaaatctcaaatttacaacagcatatcgatgtctgaaatgttaatggatttcaactctgtggcttattgacacttgtggtttttagagttggaagaaaagtaatcaatgtattgagtgaacataaactctgagtttgtatggtcacagctaaaaacccatgcaataatttcttcaagatattaatattacgaaaatttagtgacaactgaagttatgtttcctatttattgtctgtaaaatgaacagataaataagagatgaagaagcaaaagacaaagaggagagggaaaaagagaaggaaagggaaggggagagaggaggaaggagtaagaatggaaaaagtgggaggtaggacaggatggaggatggcagcaacaggaatgcagatctcaattagcaacagactgatttatcagctagaggggcagcaggaaactactgagtcaggcaataaaaagaacttaattgctaaagaagaggctatttcaatgctaaagaacagagaaatggcaatctagatcaaaagtccaaaaacatagagtagttagagtacaactgaaagcagtagattaaagcacaattttacttcatttattcagcaagcaatatttctcttcacataaataataagcagattagaaaaataaaagttgctgaaggcaactgagctcttacagtggaggggcacattatgtgttactgatgtcctcttaccctcaaggggctcggaggccagaggggcagatggtctgggcaacaaaggttgtaataataaggtaataaaggttgcctcagccatcttcctttacctctcctctctaagtggttggttggaatcgctgatctctaagttccatcatagttcagaaatatatcactatggtcttctgtaagaggcaatcaaaagtagaaatttatcttcaaattgagaagtaaaaaaattaactagcacctaatgaagaaattgactttggcatctttcacatgattactatcaaaaatacgccaaaatagacctcttgcagtgccgagcaatgactgttactttacaaaggggcagctgcctcccctcaaatttcttcatttttcctacccaccttgtccaaacatttacttattacacaataaaaagcaagcacttttttattaggcattgttatgggttgaattgtgccccctgtccaattcatttgttgaagttctaccctcagtaccttagaatgagaacttattttgcattagagttgttgcggatgtaattagttaagatggggtcatcagggtgggccctaatccagtctgactggtatctttataaaaagggaaaatctggacacagagacgtgcatagagggaagacaacatgaagacattcaaggagaagatggccatctacaagccaaggagagaagccaggaacagatccttccctcaccgtgctcagaaagaaccaaccctgcagacaatttgattttggacttgtagcctccagaaccatgaggcaatatatttctatggtttaaatgatctagtttgtagcactttgatacgcagccctagtaaactaatataagtactttctatgtacctgctgcacattcctctaagcaccctgcatgtatcattatacataatcctcactgtaccttcataatgtaagtattagtctaaaacccacttttacacaaaggggaagctgagacacagagaagtgatgtcaatgactcacattccgtaagtggcagggccaagattcaagcagaggcaattcacttcagagtgtatgagtttaaccactgtacacactgcctctcatacacgagaacagttcccaggagacaaaacttcacagtgttgtgctaatacttctttcttctagactctgctcactgttccccctgccaagaaccctcttgccccatatggttccatccaacctctacttctgttatagcctttcctgaaatgggctatggctcttccatatgttactccagcgaagcactgactacatggtgttataattgctattcaattgtttctttctcccagtagattctgagctcctggaggaacaagaatgggatcacacttggtcatttttatatctgtggctcctcgaagcaagtcttgtacatcaaaagaattcaatagctatctgtcaaatgagtaaattaatgctaaaggaagccctagggaattctgtaggagctaactttattaaacacacacacatacccccacccctgtgtattaaatacacacacatattaactatattaaaggacagacaaaattttagaaggattgacatcaagactttaatactggtcatcatcaaacttatataagaaaaatgtaacactagagtcctttaaactttccttcaaaggaaaaggaagaggctatttatgaaacgtcgcatacattaatcagttaggcatttcaaactccggaattcatttgacatttaattgtaaatagaaacacagaggagctgatccaacagaaatcaatagcagagttgaactcatatgcacaaaaagtggttttctagagtgtgatgataatagaggcagaataagttgatgttttctttcagcaaggaacatttggttctatctttcagaaagctgccaaactaattttgattacaaattctctagcaactccaaaatgccatggggagagaggtcaaagacagatgtgttagttgaaagaagtgacttgaaattagaaatgctgattcacatagaaatataacgacatttagcatctaacacctattatttacaaggaactgagtgggcaatgggaaaataatatttgcatatgtaaacacactcacacaaaatatccatatctggtagttcctttaaaggcaacttccctcattaggtttataacataaactgtttatcccactgttggcacatttaaacaaaatggtgtttcataataaaagatatataatctaagaggtcttttaaaactcgagagataaacaccacacatcaataaacttgctttaaattttgatatcatgatgcttgaagctgcgagtgggtttaaacacctcctcctctatgctttgctttctcctagccaatatctgtagaagtgatgcgtaaaattgaaagagagagtaaatgtaccaataagggtcataaaaatggaaaataaggatttcctcctagtgtaaaagtcaaaatttagcaggatccattctatagaacagagaaaaacataaaaattagcaaagaccatttacatttacaaatagaactaagttaattttagaagttagaaaattaatatataaatataaatatatttttatattttattggtaatatgaaatcataatttctttataagtctaaagaatggttatattaagctgtgcttcaccttttctgagttccttttctactttaacttttagaaaatttaatgaggccaaaagagatatccagtagtcatggccataaaaatcactaactttgaaaggagataaatctgagtttgaagttaacttctgccctttatgcaccatttgacatcaagcaaattcctctcaaaatagtgtgtcctcatctgtagaatgggaataaatatcacaccatcccagggatggtttgaggactaaacaaaattaggcttcacaagtatttgccatagagtgtggtacatacaaacaagccccatgaatgttagatatcatgactctaaaagtggttaaagaacaagccagccagaacgctctaatcacttgaaggaacagagggatgagaacagtgatggagaactagaatttctctttttgttaaaaatgtattacacagaatattcactaataaaacctaagaaatagttaggcacattttatggagttcttccttgtaattaaataagtaaatgtgcaatcaccaggaaaattaagaaatccttacaagaacacaatatttttggctaaatccatatatatatggaaaacagccccacaacaacattcattgaccatttagtggatgaaaaataatttgttacacatctccttttagtcaggtacaatggcaatgggggggtaccaatgataatctcaagagatctttcaatcttcagtgagcagcaagaaaatagacaattatgcactgtgggagagggctatgactgcggtatgcataaaatatcatgggaacacgggtacagagaacctgaagggatggtggcatctgatagaatcactctggcagctgttgaagaaaagataagcggggacagcagagctgcccctaagacacctccatgtggatttaaaaaggtattcttttctcattacagttcagaaacttgtattctgttggagaaaaatgctttgctgttttttcataataaatatacaaatttatgtgtgaatgagtgtgagtgggtgtgtgtcgcagtgtggtctctgaatttgtatgggtgtcaaggtcagtgtgtgcgaccgtgtgcatgactgtatgagtgcaggagcgtgtgtatgtgtgctagtgtaagcgtgtgtgagcgtatagacagacctttacaaggtctagtaaacatctgaatggctccccttagatgtgatgctcttgtgcattccagagcctgcataaccgtgttggcagctctaaaaggccagccacctagaaatatgaagaacaaataagaaaccatgtcatccccgaaataattgaagatggcctttaccagcagtggcaatttgttgaaaggaaaacaatactattcaaactgtatttctgaaagaaaacatacagtgctgcccagtgacttggtcactaagagaatgttaaggagggggtaactttaggataataaatatcatttaccaggtatatgttttctccaaatctccaaaattccccactggatttgagactttctccattttacaagaaaatgtagacttagaaatgttggttgttcaatatcacagtgttaataaaagatgaacttggtatttgaatccatatcagtccaacttcaaaactcatgcttatagttgctgtcccatagctatttaccaaggttgagaactcacaacattgagggtggtttgaggggaaagataaggaattatctttcacacctgctaaatttgagatgcccatggcaggcttaaatgaaaatgtctgggcaagccgaagattccaatcttggagctactgtcacacttagaggctagagctgaaattcctaactcagcaaatagtgctgccggttacaggcatgtactttaccacttagatgaatttgtatcatgagtgcatagaaaagtattttgaaacgctgtaccctcctaagatgattctccttcttgtgcgtatatctttatttaactagaggcattgagtgcctcaggaaggatgagaattattaaaccagaaatgcaaggagaaaaaggaatcaacgcgaatatttaattttcaaaacagaatttttgaatctactccagcctatctttgtggaaagtgaagggagttttctaaattttgaaagctctcttccacacttcagaaatgaaagttgtctaacacagatcttggggccggccccgtggccaagtggtcaagttcgcgcactccgctcggcaacccacggtttcaccggttcggatcctgggcgcggacatggcactgctcgtcaggtcatgctgaggcggcgtcccacatgccacaactggaagggacaacaactaaaatatgcaactatgtactggaaggatttggggagaaaacgcagaaaaaaattaaataaaataaaaaaataacatagatattgtggttttagctgcagatatgatgtaaggcagcagttctccaaccttgacagacatcaccattacctacctggagggtttgctaaaacagcgtggtgggcctttttccctgaacattctgttcagtggtctgaggtggggcctgagaattttcatttcttttaagttcttatatgatgtggtattgctggcacagagaactctctgagaatcattcctgtaaagaaagttccatccagatacaatatagaaagcctttcatggaaaaaagaagaatggagatttaaaaggaacacaggctgaaaatgctacatgagtctctaagaagataccaaagtccttcagccaacaggatagaaactgaaaatacagcctcttccaatacctccagatatgatgagtgatagggacaggtatgatgcaaaagtagtgaagcaggagaggatcagaaaggtttctagaaagataaatgcacctgacacagctctctgatcctgtctgggctgagttgctatgcatgagacccaagtgtccctgtgtgccctggaaaagatgaatcaagaagaagggcaggcaaagagtggtcaagccgagagagatcaagggtcaacaaactttttctgtaaagggccagttagtaaatattttaggctttgggggccctatagtctgtcacaactcctcatctctgttgttgtagaactaaaacttaagccatagacaatgggtgaatgaaccagtgtggctggattttgttgtacactgtagtttgccaacccctactaaacaccacagggaacagaagcaaaggcatctccacctttagcagccggtataagcattatcacccccaaatggtcagaccttggtggacaaggacacgatacctggggacaataccaggcattgtgcctggacaatacctctgatcccagaggaaatcaatgaggacaaagagcacacagactacaagcatctccttctcttatcatgggacatggggatttaccctgctcccagcaccatgtttggaagaaaagagaagagtatagactcattgagagaagacacattcctgacatgaaataggaacttcaaattgactgaagatttagtcaatggcaattgcattcatctgaaaaagaccaataaaaacccaaagtagcagcaatagctttatttagcaaaatcattttctctctccatcattgtgggcaagggtccagttactgacaaataaaacagaatattgtttttgtatgtctgagtgtgatgtataattatccaccccattacaggagaaaaaaatatcatttctgtcatcccacaagttcgcaggggccctcctaaaatcggagtcagaatgtagagctcttctttagagcatatgatgtcaacagtaaagggttcctaaattcctcatatttgcagctctcaaagcacctgtcaaattttatcatgagcattccttacttttttaaactcctaccactagactgaaagcctcaattataggaattacttaaaaggagttttcacatcccattaaagacccactgcacagagtggttgttcaaattttatgttgaattgtttgaactgatttttacccgactagaagtaaagttattgctgtgaaacttcctcattaactcgttctagtagcatctcttttgatcactacaagaaagagaggtagttgtggtttaccacaaacacataaaactattttcaattacatttttaaaaaaggctaaaaattctgtttagaaatttctaaagattctgttgagaactttaatctgagtcagtctattaaatgactagtcttagaaattctcttgcatctctcccccaactccactccccccgactctatctttttctatctcatcacactatttcaaaaatcagaaaaacaaacaatacagagctggattatataagtgatctcagcctagttaaagagtcccattaaaagttcctcagcttcaagaatcatgtttagagaactacgtaaagcatgacacaaaatttctcaagtaagacttcttattgtatacaactatcaagttttcaagaatggaaaaaagagagaaagtgagaaagagagtagtgttatctctcttcctttgcaaaccaatcaatcttcaaaagaaagccaagaggaacgctgttccaaggcaggcccgctgaaatgagctccaggcctattagccctgcaagaatgggctgaatggatccagacgtagggagctgtgcctgccagaatcaacctgctctctggagagataatgagtaggtgcagcagcgacaaagaggcaacctttcctcatgcagaactctgacggcaaagataagtggcaatgacagtaaacctatcagaagtttttaatgaactgagtaattcaaggcaagtggaagaaattcaggagaaataaatgctaaaatcttttatcccagaacttttctaaatcagtcaacaggataacagagaaataacatgtacagacagaaacttattttatttggtagtatatgtgtatgcttaagatgttttccaagagacctaaaaacacatcaaatgcctctttaattggtttaaaataaacggggttaaataactgaattcatttccttaagtttcttatatccacattctggagttgaacacaacacaatacagctttacaagaagcattaaggaaacaaacggtttccagaatatactttacttgctaactatgtattacctgttattttctctatcagattaacatttttattaagtataaagaaaaatatctcaattaccttcactgaaagaataagcaccttccaatttgtgccttagcatagagtaggcactcaataaatatttgctgaaataacaacagctgtgatttggggctgcattttcctactttcgttaaaaaatttaaacggcttatctcctgggaattcatataaattcaaaacataaaatggaattgcatgatctaaatacagttcatgaaacactgaaacgctacctggtttcctcttcctgtttataggtcagctcagttgctctcctcttctatttatcccctcacttcttcaaataccttctgagctcccgctttgtcagaggcatgcacaagcagtgaaagttgacaggaaaaaataacatctattattttgcccccacagcattttcccccaatctcacatgtggttgtggtgggaacatcagtcagagggagtcctcatctactcctgggccaccagatggtcacctgagctgggtgagccaatcttaaattctattcccttcccctttgataagtcaaacagtgtaaatgtggccaactaaggctaatcatattccttccagaaacatttgataaatgcatttggaaacaagaggggctccctgattctggtatactgaaaaaccaggtaaattcagagctgcaaatagctatctttcacacactgtgttgagaacctgcttcagaatggagcaaaacagaggcaagtagaataaagaatgagagaagagaggaagagggagaaggaaaaggagggagttgagggaggaggagaatcagaattctattctgagaggctaacaaggctaacaaaggccacatcatttcagcctctggttccagacatgcctgaagccatccaattcctggacttccaagttaaaagaagcaatgactaggactggccaagtggttaagttcatgtcctgtgattcagtggcccagggtttcgccggttcagatcctgggggtgacatggcaccgctcatcgagctacgttgaggtggcatcccacatgccacaaccagaggcactcacaaatagaatatacaactatgtactgggggctttggggagaagaagaaaaaaaaaaaagacggcaacaggtgttagctcaggtgccaatctttaaaaaaaaaagaaccaatgaattatggaataaactagttcaaattattttttgacacttgcaactaaaagagtcctaattcatacagtcttcaaacagaagattaagacacagctacacatagctaattacagttatttctccttttattatgaaggttaaaaaagtgatattccaaggggcctggctcgggggtacagtggttaagttcactcattccacttcagcagcctggggttcaccggttcagatcccgggtgcagacatggcaccgcttggcgagccatgctgtggcaggcgtcccacatataaagtagaggaagatgggcatgaatgttagctcagggccagtcttcctcagcaaaaagaggaggattcgcagcagatgttagctcagggctaatcttcctcaaaaaaaataaataaataaaattttttttaaaaaaagtgatattccagggtctggtctcatgggctgtggttaagtatagcaggctccacttcagaggactgggttaggttctcaggcgtggacctgcaccactcatcagcagccatgctgtggcagcgacccacatacaaaatagaagaagattggcacaggtgttagctgagagtgaatttcctcagcaaaaaaaaaaagaaagaaagaaagaaagaaagaaagaaagaaaagtgacattccacaggaaaatgcaaagggtaactcataggccttgagtcagaactgaagaaaatgggtggcttgtatacaagatgtggatgaaaggcacatgagagctgacagaaaaaacattctaagcagagggatgaatgtgagtgaaaggcagcgtgttaggcactgttcactcaatgacccaatccccactcccatctccttctccttaggcatcttccaggtggggcagccatgacagagtactggccaatgaaatgtgagccaaagacagttgggtagggcttctgagagaccttctgttttactgaaagggaaaaaaagacacaacgagctggcctagccctctactcttatccctttccatttcaccctttcccttccctggaacatggctgaaaattggaagcgcagcagccatttactgtgaatacgagatgacaatcatgaggacaaaagtcaacatactaaagaaggtgtagcagagaggcagaaagagcctgggtccctgaaatcattgctgaggagttacacgagccctgaactgtttgcatacctctagaatcttcttatataaataccaacagtttgtttaagactcagataatcgtatgttctgttacatgaatcattcttaactgatacaggagcttagaaattacagagtatctgaagaaaaattaaagctatgttaaacactcacaggttgtgcaaatgtctgttctgaatagttgatacctatgctgaatctgttgttaaatacttttagaacgaccactcagaataacaagttgagtcaactgaggggcatgaagcagtgagagttgaagctggaaaaacattgggactgagatagtggaggtcctgaaatatcactctaaggcatataactttctttagtagaaaacataaaatttccacttatgtgtagatgaaacatgctatactgatgagttcattgagtgcaacagtgagaagagctgtcagaaattccgtcgcattagcatctaaaccaggaggaacttcacagtatattgcagttaacagtttgttttgtgaccacctagtaccttaattcactcttgaaggtttattttaaaaattaacttaagagtatctgggttataaaattcatatcctgggattagttattattgaaaacacctggcttctcacagaagctatttgctagcactggccaatttacatatgtgagcgagagaaaatgaagttcaagcttttctcaaaataaccttcagaacaggaaaatgtcttacctgaaactattttaaatatgaacacacaaaatggcagctaagataccaagcaaaagaaaattttgcaattaaagaatggaaactagaaagcaaactcttacaagacggttaccggcttttaggttatacaagttaatttgacttaagatatttttagattttcttattcttaattatctgctaaaatgataaactaggaagttaagctttctttcctctcttcagtggagagctagtgagtgaatagttcagctatcctgaaatgcaaatgctttctttttcaactatttgaactattagggaaaatgcatgcttatacttgcataagtgcaggcatacaggatgcaggaagctggcttcgttgatgcattattccatctgcaaacactccatggggtacaaacactccatcctggtatttctctaagtgtaaagtctgcttttcagaataaatcatttgcacacaagttgacaggcataataccctgatggacaagggcaaagaccaactttcccttccttgttccttccaagttgaaaaaatcaatggaagatggcctttctcatctaatttttttttttttttttttaagattttattttttcctttttctccccaaagccccccggtacatagttgtgtattcttcgttgtgggttcctctagttgtggcatgtgggacgctgcctcagcgtggtctgacgagcagtgccatgtccgcgcctaggattcgaaccgacgaaacactgggccgcctgcagcggagcgcgcgaacttaaccactcggccacggggccagccccttatctaattttttttgacacatatacaggaaaataactttccctatagctaatttaaaatagaaactgggaaacactacttcagaacacttctgcagttttcaaagcaaaaaaagtttttccttcaccgtccccaattcacagcaatctttttgaagacagaaatatttccagcttattgaaaacattactctgtaatgatctgttctcttataatttgttgtaggaaaagatctgttacctagattttatctgtcaacttttacgtttaaatattctctttctggatccttatggaagtgaactgatttccttatgcataaacttgattcataaagcttttaagtctgcacaggaagtttgtgttcatagatttctttctttttcttttctttttgttttgagagacacagtctcacaggaagagctttcatttaactgacttcagtttcttattcttattattgttattgttatcactaacttacctcagatttccaaaagaattctgattaggaatacattgctatgttggaagaatttacacaaactgaaaacccactggaaaacaggtggttctactttgatccatcaccatgggacagaagtgggacccaaggacaggaacacaattaagcaaatgtagatgcaaattctctccaagttattattcttgtctgcagaaataatcacggtaaggaagacataccactacagtttacactatcaccgcagattagtggaacatatcttttttgttttgttttcaaaatggtattctggcttaactatattttttatttttgctgtatgtgttgaagatcatacatatgtttcacattaagaaaatgacaaatcacaaatatttgcattctcttattttaacgtcatgattgtttactctatatttactttttcatgagattcactgtaaattacccatttaataacatatatttttaattagacatctgaagcaggatctactcttagggtttatttttactttattgcttttattatcatggtttaatcgaccgtaagtgctgttattgtttcagtatttgaaagtatacttaacctacagaccaagtcccaaagcaatttctcaacattaaaatctctcttttaaatattttcattcctcttggaaaatgaattttaagggaaacattttagtattaaggaaaaaacaccgtagatatttaatctctaaaactataaattaatttatgaaaaataaacaggaaagcaaaatcttcaggattaagttacaggaaaaatatatgtttgtgcatatgtgttttagatatagttttagatgcaaaaatatctattttttaagagaacatacagattgctgggaactgaaaaaaacacaaagtttacaaaacaaaatatgaagaattcaaacataccattctcagaacataaaaattaatttaactaaatgtatataacccacatcaagattatgacaacttacaaatatgcttagaaaattcaaccatgaaaaacaagctgttcctttttccccctaaaccctcagaatccagtaaaaggattcaatcagagcccgccatttctcaggtaccgaatatctttattcaactcccttgagagtttgtaatgtattcttgtcatggaatgctaccctctgccctcacctgcctccactcctgactccaagcccctgcaaaagtttcaagttaggtgagtagaaccagcttttgtaagatggtctaaatcttcaagtgaaatcagtatactctttgttctggtctaataatctcacagaatgtagttccaggctctcatctacctcagggaagattcatctagtgtaggagaggaggcagggagggaaatcatatgctaattaggctgtcccttgaaaagtactcagtagtttagataagtaatctttattaccttaataagtaatcaggagaaaccagtcatttattcaatatttctttcctaatgtggtgtagcagaaccgaacaggaaaagagatgaaaacgaaaacaggaagaatatcacggatgatgtattttgagtcaagactgaaaatcagtttaaagtttctgaacaagcttattaagaaaaatcatgtagacatatctaacattccttaatcgaaaatgttttctgcttgtagaatctttaaaggtattatctactttaaaattcattttaaatgaattgcattttaatgtgatatacaatcaggaaagaccaaagtttttaatgcactggcacttagtctaacatttttataagctcggatttaatagtactgctgacattaatgaagtaatctgcacaagctctagagagatcctgaaatctaaaattttaaatggcctgttctccaatttgagctttattttttaatactaaataattaagatgtttaagggtaaaaaatatagttaattacattattttcctttaagaaacaattttctttcattttttccattttgaacaatgaccttactaccacgtgtcaattcagattgattagttgttagctcagatgatgtcaatcaaactatcaaggcctaaagtttgtaaaaacttcacccttcctggcttgaagttcatataatattaaaaggggaaataatcatttgttctgtacaggaaagtgcatctgcatcgccatagcccaggtctatgtaactgctcaaagatggacacaacctacacctctccctcttgagagagaatacctttgattctaatataagggataacacattatataaataatatttttccaaaatatttaatatggatttagttttattaaacaaaactgtgctttaaattcactctatggtgtttgaagtttaaaaaaaaatcttttagagccttcttttgtaagaacgcaaatgccagcacccagtgcttcgtatatattgagaacccaattcaatttgtttattagttagttggttggtaggttgattggttggttggttggatgtatgtacagacagatgaatgaagggatgacagatgaaagaagggaagggaaggaggaaaggaggaagaaaggaaagaatcaagggctctaataatgaaattgaatatataaaacagattatcctgaagtatatctggatgaagaggatatgatatgctctcccagaaattcttggggctccttgaggcatagtctaaaaaccactcacctaaagaggctttatgttaataaatctactggaggttaaaataaataataatctgtaaaaattaagaatagactcttaaggtaaacgaaacatcaaatgttgaacatgtcgattattatttgttaaccagctctggtaagcaattattgagatctttggttgatacaaaatgataatatagattcatttttacataataagtaatagctgtttaatgttgggcaagttccttaaaccttctatccctcaatttctttgtttataaaacagggatgatagcttacaagtcacttacaaggtgactgtaaacattagagttcatacaggcgatgtacttagaatagtgactagcaccaataagcactcaataaatggtatctatttaaaaaaacaaacataccatccttcgaaactatgattgcttctaagggcatagtatgtaccatgcacaggtcttagcaaattatattaataaatgtaacatctattctacaaatcctagctttatcttatcacatatacttttatttaatttacacaatttttacaacaattttgttgaattcttccactactttgaggcattatgctccctgaaaagtagatgacaaagaagtcaaagttattgtccttaaggattcactgtacaaagaaagcccatttgctaagcacattaaaatttacaaagtattttcacacagagaacttcacactaagcagaaaaagcctatctcacaaaataggaataaaatcattatcttaattttataaaagagggccctcagttcctgagagtgtaaacaagctacccaaggccacagaactttcagaattctttggtttactttcattgaaggtgtattcgtaaaaaatcatgctatggcattcaagcattcctcttttctttccttctctccctgttctctctttcctcttcagataataacttgtcaaagggaaggcttatatccagaatgtggattcctgacgctctcctcatactgaagccttcctgcatttgtccgggatgaaatgagctggtgaaacaaggggaagatcaagccaaaatgtgaaatgcctttcctcccctttaagacacatctaaaactctcactaatgtataagggatcctctagtcagctctctatggaggaggaataagactaataggcatttaatcaatatttcttgatttttttagtaggaaaacattgcagagagaaagagaggagtttataaagctttcctattcctatgtatctttcagtggagcttgatgaaagtgaagataggggatgaggagagtattgtcagaggaccagagctagaagagaaaatgaagaatccttcatttctcattttcacacctaagtactatacctttttcctccactgtgctgctcagtgaatactctctcttctcaccagttacctcatcttcacagatcctccaaagcacggcccctttcttgggaagagccacctcatttcacctcctcattccatcaagctatctccatcccaccatgataaatctactttctacttgaagtcttagtaggtctgttaaacgtgaggatagctaactgccatgaacgtcacggcttactttttccttactgcctccacaaatgcattcattcattaacaaaaacaaagaagaagctgagtgatttgtgtggtaaacactgagttcctaaaattttgtttttgtgtgtgtgcgtgtgtgtgagaaagaaatgtgtggatttttttagtgcctagaaaagccctctctcatttcatcattatgaaagtcaatgggtttgaaggtttgtcaaaaagtaaaacatagaattaccatatgatccagtaattccacacccaggaatatgtccaaaaggattaaaagcaaaggcttaaagatgttttttaaatataataaatgactgattcaagatttctgagtagctcttctttgggtttattcacatgcttgattcaagtcctgagcatcgcttgcctagagcctaagatccttagactaaggtactgatatccttagtaatgttactgactctactctctcttcctttaccatatcctcttgattaccacaaatgcaatctttccaacatatgaatctgaccatttttgtctacaattaataagtgatttatagatctcctctttatccaacaaggtggcatgtgaatgcctcagcatgccatgaaagactttttgtgatactggctccatggacctaaccagaaacttcttctaactcaccagaacaccttcttttttgaccatgtagagctgctcaacaacccatctgtgactttgcaccagcctgaaatcctgctcctcctttccctactgggtgaacatatctttctggaccctactcaaatgtcacctcctcagtgaagccttccatgctcccatagcacgctatattttgccttcacaattatcaagtggattacaatgactttctttagttgtgattttcatgggtaggagttccaaggggatagaggtcatgtcttaacttatctttgcatctcttactgtgggcttggcacataatggtcctcaaagatccaaagtagttgttctagttcctatggaaatatcagaatacctattaatccttacatatttatgtcaaaaactcaaaatgattggcccagtcttacagaaattttaattatcctctagttgttgtggttcttgtttttcactgagagaatatataactctatagtacactattgatttgaacaatcaaaattcctggtagttatgcttatctatcttaaggggattactttatatggcatcagggatatcacctcttcttatattaataaggaagttagaggtgtaatgcaaaagtatatcctctggatttagaaatgactggaataaatttgaatttaattaacctcaataagcatgagttcctcaatttataaagtgagaacaatgccacctaggtcatagggccactccaaggattgagtgagataaaataagcaaagcactttggagacagattgtcccacacatagtaagtacttgacctctttctcccatcttttccttgttaattatttcaaatcaccatgacagtttattttgatattctacctgccttaccacttaaaactcacacgaaaatcagactcatatcctgatgacaatgagaacaccaggtttttattcattatagtaatcagcaaagaataatacagtaattacagtagcccacaattaattgaactgcattaaaaatagagtggatatatgcttaaacaggtggtatgtgcctctgctttcttctattgtgcttccaaaatggtatgtaataaaaccagtctgatcactttatgatatctgaaatataactcatcttaactgaaaaatttcaacagcaattgataagcaaatccaatgatctatcttgaaggacacttaggtttaagagatatagaaggaaagagaatctggacaagcacagacgtttgagagatgattaagagctggggcagggctgaatgaaaaggttcatgttctacatgaggctgctgcatcaagactgggagaggggattttttcagctactgtaccaaccagagagtcaagcaaaaatggagaaatagagaaaaatgttccaaatgaaagaacaagataaaaacctcagaaaagaagcttaatgaaatgaagataagtattttacctgataaagagttcaaagtaatggtcataaagatgctcactagactggggataaaaatggataaacacagtaaggacttcgacaaagagatagataatacaagaaagtacaaaatagaagctacagagctgaggactacaataactgaacagaaaaatacattataggggttcaatggcagactacatgaagcagaagaaaggaacagtcaactcacagacaaggtagtggaactcaaccaattaaagcagcaaaaagaaaaatgaatgaaaaaattgaacataggttaagagatttatggaacatcatcaaatggactaagatttgcattaaagggctcccagaaggagaagggagagagaaaggggccaaaatcttatttgaagaagtaatggctgaaagcttccctcacttgggaaaagaaacagacatccagatccaggaagcccagagagtttcaaaagatgaacctaaagagacagacactaagacacagtataactaaaatgtcaaaagttaaagacaaggagagaacactgaaagcagcaagagaaaaacaacttgttatgtataagggaacccccacaagattataagaagattttctagcacaaactttgcaggccagaagggagtgacacaatatattcaaagtactgaaagaaaaaaaactttcgaccgagaatactctacctggaaaagttatcatgcagaattgaaggagagataaagagttttccagacaagcaaaagctaatggaattcttcaccactaaaccggtctttcaagaagtgttaaagggacttcctcaaactgaaaagaaagggcactaattagtaaaaggaacacatatgaaagaataaatctcactagaaaagtaaatatatagtaaaagtaattgattaattacttataaagctagtatgaaggttaaaagaaaaaaagtagcaaaaataactatgattacaataattacttaagggatacacaacataaaaagatgcaaactgtgatatcaaaaccataaaatgttgaagaggaagagtaaaaatattgagctttagaatgagatcaaacttaaagtgttatcaacttaaaatagactattatagatataggttgttatatgtaagcctcatggtaaccacaaagcaaaaacccatggcaaatacacaaaacataaagagaaaggaagataagcataacactaaagaaagttatcaaatcacaaaggaagagaacaagagaagaggaaaggaacagagagaattataaaaacagctagaaaacaattaataaaatggcaataagcacatacatacaaataattattttaaatgtaaatggactaaattctccaatcaaaagacacagagtgactaaaaaaagtcctacctatattctgactacaacaggcatactttagatggaagaacacatgcagactgaaagtgaagagatggaaaaagatattccatgcaaatggaaactgaagggaagctgcagtacctatagttatatcagcaaaacagactttaaaataaagactgcaataagagactaagaagggtgttacataatgataaaggggtcaatcaaagaaaagaataatgatataatatttgtaaatatttatgaacccaacattggagcacctaaatatataaagcaaatatgaacagacctaaagggagaaatagacatataaagcaaatatgaacagacctaaagggagaaatagacagcaatacaatattaataggggactttaatacccccttatatcaatggataagtcacccagacagaaaaccaataaggaaacattagccttaaatgacatgttaggccagatggacttaacagacattcacagaatattccatccaaaagcaacagaaaacacattcttctcaagagcacatggaacattttccaagatagatcatatgttaggccacaaaacaagtatttaataaatttaagatgactaaaatcatatcaagcatcttttttgaccacaacagtatgagactataaattaattacatgaagtaaactagaaaattcacaaatgtggagattaaacaccatgctactgaaccaccagtgggtcaacagataaatcaaaaaataccttgagataaacaaaaatggaaatataacataccaaattttacgagaagcaacaaaagcagttctaagagggaagttcatagtgataaatgcctacctcaagaaacaagaaaagtctcaaataaacaacctaactttacacttcaagtaactacaaaaaaaggaacaaagcccaaagttagtagaaggaaaggaataacaaagattagagcagaaataaatgaaatagagacaaaaaagtcaacagaaaagatcagtgaaactaagagctggttctctgaaaagataaacaaaattgacaaacctttagctagactcaccaattaaaaaaaaggaaggactaaaataaatgaaatcagaataaaagaggatatattacaactgctaccacaaaaatacaaaggatcataagagactattatgaaaatctatacaccaccaaatttaacaacctagaaaatggataagtttctagaaacatgccatgtaccaagaccgaaccatgataaaatagaaaatcagaacaggcagattactagcagggagattgaactagtaatcaaaaacctcccaacaaacaaatgtccaggaacagatggcttcactggtgaattctcccaaacatttaaagaattaataccaatccttctcaaactcttccaaaaatagaagtggggggaactcttccaaacacattttacaaggctagcattacactgataccaaaagcaaataagaatgccacaaaaaaagaaaattacaggccaatatctctgatgaatacagatgtaaaaatcctcaacaaaatatcagcaaactaaattcaacagtacattaaaaggatcacacaacatgatcaagttgaatttatcccagggatgtaaggatagtacaacacctgtaaatcagtcattgtgatacaccacaccaacaaaaatgaaggattaaaatcatacaatcatatcaatagatgcagaaaaatcatttgacaaaattcaacatccatttacgataaaaactctcaacaaagcaggtatagagggaatgtacctcaacagtataaaggccatatatgaaaagcccacaggcaacatcataatcaatggtgacaaactgaaatcttttcctctaagattagaaacaagacaagaatgttcactcttgccactttcattgaccatattattggaagtcctagacatagcaattaggcaagaaaaagaagtaaaatatatccaaattggaaaggaaggagtaaaactgtcactatttacagatgacatgatattatatatagaaaaccctaaagatgccatcaaaaattgttagaactaataaaccaattcagtaaagttgcagaatacaaaatcaatacacaaaaatctgttgagtttctttaccctaataacaaactatcaggggctggctccatggccgagtggttaagttcctgcgctccgctgccgcggcccagggtttggatcctgggcgtggacatggcaccgctcatcaggccacgttgaggcagcatcccacatcccacaactagaaggacctgcaactaagacatacagctatgtaccagggggatttgggaaataaagcagaaaaaaacaacaacaaaaaaagattggcaacagttgttagcccaggtgccaatccttaaagaaaaaaaaaaaaaaaactatcacagaaattaagaaaacaatcccatttacaattgtatcacaaagaataaaatacctaggaatatggagccagcctggtgttatagtggttaagttcacatcctctgcttcagcggtccaaggtttgctggtttggatcccaagcatggacctaagcactgcttatcaagccatgctatggcaggcacccacatataaaacagaggaagatgggcacagatgttagctcagggccaacttccctcagcaaaaagaggaggattggtggtggatgttagctcagggctaatcttcctcaccaaaaaaaaaaagaaaaaagataaaaataaataaataaataaactacctaagaataaattaatccaaggaaatgaaagacttatatattgaaaactacaagacattaatgagagaaactgaagacacaaataaatgaaaagatattctgtgctcatgaattggaagaattaataacgttaaaaagtccacactacccaaggaaatctacagattcaaaataatcccaatcaaaattccaatagtattttccacagaaatagaacaaataaatcctaaaatttgtatggaaccacaaaagaccctgaatagtcaaagcaatgtggagaaagaagaacaaagctggaggcatcacatccctgatttcaaattatattacaaagctataataattaaaacagtatggtattagcataaaaacagacacctagatcaatggaacagaacaaagagccctgaaataaacccatgcgtatacggccaattaatttatgataaaggaaccaagaatagacaatggggaaaggacagtctcttcaataaatggcgttgagaaaactggacagccacttggaaacaaatgaaatgggataactatcttatatcataaacaaaacttaacttgaaagaattgaacacaggacctgaaaccataaaagtcctaaaagaaaacatagtctgtaagctccttaacataggtcttggtgataattttttgaatgctatgccaaaagcaaaagtaacaaaagcaaaaaataaacaagtgggactacatcaaactgaaagcttctgtatagcaaaggaaaccaacaatgaaatgaaaaggcaacctactgaatgggagaaaatatttgcaaatcatctatctaataaagggctaacatccaaaatacacaaagaacccacacaactcaatagcaaagaaacaaacagtctgattaaaaaatgggcagaagatctgaatagacattttcccaaagaagacagacagtgagccaacagatacatgaaacgatgctcgacaccattaatcatcagagaaatgcaaatcaacacacaagatatcacttcacacttcttagaaaggctattatcaaaataagaaataagtgttggcaaggaggcagagaaaagggaaaccctgagcactgttagtaggattgtaaattggtacaactactgtggaaaacctccagcatgaaggttcctcaaaaaactacaaatagaactaccatatgatctagcaatccacttctgggtatttatatgaaaaaagagaaaacactaattgtaagactttttctaaaaaaagatatatgcacttccatgttcattgcagtatcatttacaataaccaagccatggaaacaacctaaatgcccatcgatggatgaaaggataaagaaattgtggtatatctacacagtggaatattattcagccataaaaaaacaatgaaattttgccatttatgataacatggatggacctcatgggattatgctaagtgaaataaattagacagagaaagacaaatgccatatgatgtctcttatacccagaatctaaaaaaataaaaaaaaaaagcaagctcatagaacagactggtgcttgcaagtggtgggggttgggacatgggaaaaatgagtgaactggtttttttttgtagtctaaataaattgaataaaaatttttagggggccggcccagtgatgtagtggttaagttcccatgttccacttcggaagcccagggtttgcaggtctggatcccaggtatggacccagcactgctcgccaagccatgctgtggcagcatcccacatacaatagaggaagtttggcacagatgttacctcagcaacaatcttcctcacacacacacaaaaattttttaaaaagagaacatgaataaatatctgattttcttaactgatgatttaaactcaacttcagaaacaacataatgaataaatccaaaacagtaaaccaaccacaggtcatacagccatttaaaactaaaaattgatattatgaataaccttaaaatgcttttctgcagcaactaaaatccatgcagcagcaaaagtaattatttaaataaacagatcagaatgtacataatattatagggaaatttcaatatctaacaatcaatttaatctatgtagtctactaacgaagagttgtcaaagggtgagttgttggtaatattgatatagtacagttaaaattactgacagaatttgaaggtaaattgggaaaagaaaagactattaggagaacaaagtctaactgattttgaatttaggtaagacatatctgatgatacgatgtctttcaaacattgcagagcacatatttcctttctgtcctttatcacaaaccaataatttcttactacttctaacaaaagaaaaagactgaaaactacctggtgttacttttaaaaagaatctttctttttaaagctagtaatggtatataggtattatgtagcggcatatatttaactcatacatgatgatataatattcccatttttcacttcagaactaggaatttggactaatcgtggaaaaaatcgtatcaacagtattttgaattcttaatttgctgttaaagtgactgagtgacaggttaaaagagaaattaacagcaaaaccaggtaagaacagttgaaccagtattattaaatatcacaccaattttatactctgaaagcctctcaagaccaactcaaacaaatttaagcaaggaaagaagtgaataatgatcatattctgttacctaataacagtacttattttaaaacatcataaaagcattaaaattccaaatcaaggtatgtgactttcaacctttcccaatttgaaagggtaatgggaatacgatgcaaccttgatgggaatagaggcaaatttccaggctaggagagtgcagcaagtgttaatgttaaatatttccaaataatattacacatgaaaaaaatactggtataacaaaattttatatcaagttcacttgagaagaaaaatttcaatttgttttaactttaacaataatttaaaaattttttttaagtttttgttttgttttaaacatgcatgccccacagcctgagaagctgtctttctattttctacatttacaagatcattagtctactaaggagctttcagagagaaacaccagtggctggatttcctgaatctttaagccctggactgggaggtatggaaagtggctggagagctttgcactgaagaaggagcgtttccaggcaaccttgcacagttgagcagccacaagcaactgaaacaatgcttaacactggcagagatccattaaaggggagtctacagaaatacactgagtgtgtgtgcatcctttcctaaaagaaacaaatgtttaaatacgagctagagtaaataataaagagagaaataccggagaaaccagtctagagaaaatcagtatattctctccattcttttaacggtttttcaatgcaatggacactatttcaggaatgttaacctatttgtatgaataaagcattcacctctttcttaattgtcagtccatgttatgaatacagtgtgttaggctacattttataatgcaccaatacataattaggtgatctgatcttgtaccactggtaatctcaactgtagtacctgtctcagtgtgaaaatggaaacatactaaaattaaaattgatgatacttaaatgatatcatattctgggacatttggctgggatggagaggcagccgtagagtagaaggtcacctacaccctttctctaatcttctgtagaatcatctatcttggaaagccaagtgtcaagactccaaattttaaatatatcttcttatgccagcttttgttctaacattgattacttatgtttctttcaatgatctcaagttaccgaatggcattccagaataaaatattcattaaaaacagagattgaataataaaaagatccagatagctttgtagtcatttagctggcttcctatttaacaatattatttatagctctacttgatctgtacatttttaacataaatagatttcttataatgctggctcttttaaaagcctcacatctgtcaaatgtatacatcaggtttataaatcgaatgaccaaaaatgacaataataataaaagcaaactattatcttttttattagatatttaaggaaaattttgagtttgataatgatcaaagatctataaaagataatatctgatagataatcattcactctcttgcctatttatagctggaaattagtctgaaaagaccacctggaatattaaaaacaatgtcaagtttagacttcactaaagaaccatggattataccatcttactagagttgatatgtattagaagactatatttatgttttaattcaaataactcatttcaaatgtgcttcttacaggaccacctgcatttgttatgaagagcagcacttaaaatgcaaggcattcttacgaaaatgtcttttttaaaaacgtcatctgtcatgaacacacaccttgcaaccaaaagcaatagcaggatattctcttggagaaaattctacaaaaggaaatgtgagtagtaattaaacatgtcactttttttttcattaaatgaaataaaactagctttctgtcaagctctaataaattcagaagactctcagaggcacaaattactccattcaatggctttgtagtaaaaggaatctatagaagcaggatcaatttacaggccacggccaaagctttatctgtttacttgtcgaggaggtgttaagcagtatgatttaatattcattcaaccggaagaaatgcattacacattgaagctatgtgcaatgttgataattacacacctgttgccatggtaattttggaagctgcagagaatacaattaaaattcctaaccaacaaaatcaccttaccaaaacttgatgactttaatcaactcaaaaattaggaaaaagtcttttcgaatattttaaacaataactggcaaaatgaggaaaagtaaaaaagaaagtacatataagatgccattctttcttgctcttgctattctctctcttgctttctctgtctctctctctcacatacactcacacacacaccacacgtaaattttttcaaaagtcttttttctttgaaattctgacagtaattgtattaattctgttatcatatttcatcagatggtgacaatatataattagatttggtaggctttgctcactgagatcaatttctatagtttcctctactatttaaccatttagattgtttgcaaaccctacttaataaagagtaaagacatttacagcatgctgtgctcattcacgcaaaaatattgccaatttttttcagccatacaaggtacttccgtgagtttttccaagcatgtgccatgaataaaaggtttatacatatatatatttttttaaacagtcacaaaaactttggaacatttttagtgccctaaaaacatgcatggtgattgcacagttggatgagaattgtgcgcccttggtcatgcaatcggttcaggacccagattaggactgtcaaattgtgtcaggactttgcagtgagtgctcactagagtgcctttaatcctccaaggttttctcaaatgtcacagccatctggagaaaaaggaggcttccctgctgggctccactgaccacaaattactttctaaagagaaagacaacaatagaaagcagttaataaatatttgattttttttccaaaaaggggaggtaaaacactacctttccatcttaatttagcattaaatgctttcaaacaatatacaaaaatgagaaaataatgcctgcctagtatttaatctgagggcaaattcaaaaattcattacaaaattaaagaaagatttgagaagatatttgagtaactgctaacatagtgctcacttttctttgcagtttcttcttgttttagaataacgaaccattttatcccgtgtaaggagcacgattatttttaagttatgaaaagtacacattattctgtggtcccatctatttccaaacttgaaagtgcagtgttacaaaaatctcagtgacttgagtttagagcaagctagagttctgtgcaacctttcttcagaatccccactgcaagttctaaaaagaaatctggttcgagtttcctcctttaaggatatgactgtaatcctcttctctaaggaaagtcacttccttgtctggcacaaaaaagactgggaaaccagctgcactgtctcttgtaagggacactctccacagctgcattcagaatgcatagggttctgacgtccttacctgtgctctccaagcgcaagaaaacttgtccataacagggatgtaaaatattttgtatagagtgtagtaaatgatgcatgtgcctgctcaaagtaaaaatactgctttttgaatttattaaacgttctgcattatttgcatcgactcctgcctttgtggttatgcaatttgtaaaggattttttttataacatgtctggatacagtaaaaagagactttattatatcacaatgaagctttatactactgtcattatacttgcttttttaaggatgtcttttgaatgtagcttctacaggcatacatacaaaaaataattgagttacacgtgaattctacaattttatcatgctttaaaatagagttttttctataaagttaaaactttaatttttatggaggcctaaagttctacctttaccaagtgttaactctctgtcagaaagcatgtaattctacacctgctacaaacgcactccaaatcggaatcaacacaaacctattttcctactctaacacctctaaccaaaaaccagactctcattggaaacaaaggcaggatgagatctgctctgaggactcatctgatgctacacgcaaatggcatctcctgattatacagcagcggattttacaaaggtgtttaatatataacatgttttctgtattactgtaaatttgtttacttaatcaaacatttcctaaaaggtaaaacatccaaaatcggctataaaattaacatgctctgagaaccagaaaattcgagagtcaaaattaatattgccttttcaacagccaaaatattaagttcgatttatccaatttgacatttttatgtccaaaatctctggcttggtgattaatatttaatatgcattaacaaacagctctactttttaccttgtattaatctgtgtgaaaaaaataccttaactcttaataacaaacaccagagaaatgataaaatgtcatttaaaacatgggcataaaattatgaactgtatctgttatattaagaaaaataaaaggtgagaagtggcttctactctgcacaatcagcaggagtgacagggtcagcagatgatgagtagtgctatgcgatgagctatgatgatgattttaagttcagtaagtgacatgttaagtattgctatcacacagccgttcaatcaatcagtggaacgctaagagaaaaatgactgtacaaaagaaaaaccacatacatagaaccatacagcattgacattttgccagcacaaactgagagtctattcaacaagcaacagatgcaatgtcattctccttctataaaagaaattcaaatatctgcatgataaaaaacacaaatggaacctaggcatgtgactgtcacatgtcagtcatgaataaatgctgagacgagaactaagaaaagctgttaaaagcccccatcaggaagataatcatcaaaacacaaactgtattatcatctatggaattttgttgacattcacgatcacaaacaaacagctgcctaagtaggagtatttttcaacacctcattaaagcaccattgtttatgtgacgtagaaggcactcaaactcattactaacacatgtcctaagatattatagcgtcaaaactacatgtcacagccaagcaatgttcaagccatttaagaaacaaattacatcaaacctcaaaaataaatgtgtacaatgatgctgtgtttcaaagtctactataaacaactgccgatgttgtactgatacttttcaaatattttatttgcagtattaaaagatatcaaaaagagaacccaacagaaaaaaataagcagtctaatattatattgcttttattaataaaaattgaaggtatttgcatattcaaagagaaaaattttagtatttcagtagtaactgaataattgctggtagcttctgctttttaataaaaaaataaatattcacctaatgatggtgtacttaatattctcaatccattttattttcgagactttgggaagagattgtaacagaggttattctgcacaatctgtaggagtgacagcttcatgagatgatgagcaatgttatgagatgagctacagtgataacgatggtataatgatgacccactatatctcatacatgaactagagagatataaacattattgactctagtaaaataaaatttgcacatgctttgggaaatctactggttccagactacatgtaagttattttaaaaatcaggctaaaggatagtgacactacaccattaaaacaacaaacaagccaggagaaaagcataatcactgagaaaatactctatcaactattgtaagagaaaaaaaatcacttcaagatcaaaacatgttctgctcagtccttattaattaagctatgttgcacatggtcaagtttaaaggaacaaagtctaaaacttcagagagtttacaacctgaatgaaaaatacatgatgtccacctctcagttatttatgccaatatctgaataatccagagcttagaagacaaaagaaaatcactatctttgcagtttactttaaatacaaatgcaaatactgagatgagctactccacggaggacatcacttagattgaggactcataagatcaaagagtaaaatagcacactgtgaagccgtgcggtagccaagtaggcacatgtcattcttctcttgagaagaaggggaaaatgtgtagtaccatcctgagctctttgggccaagatgcagaaggaatcagacctctaggctgagatggcccaccagcccagacctcttacctaacttcaatccatatagccaacattggattctccatctctagatgtctaacaggaaattcaaatataaaatttccaataccatggtttccaaactgtgcactgaatcaattttgggaattcacagcagctcttgtgatattttaaaatttctagagaaacacaatgatactcaacatctgttggagaccacaccaacaattagcttaaggtagttcacggttccaagaaatatggtgctcccactacattcctttcaatgacatcatctctttgtaaagctgggatttagggattgctattagaaaaaaggggaattaaggcacaagaatcaatgtagaacaggaaatgagggtggcagaatccaatcttaacctgaggtcaagaatttgtgtggagtccaacaggtgcacacatccccgtaggaagtgattgtgattatttaaaaaggaaacaaaaaattattttcctttctatttatatgtattattttagcaaacaattacttaacggtaaggatgtaacccttaagttgtttggactttacttaacaaacagaactctagtaagttgtgaggacataaatcattattaagttgttaggacctaaataccaaataaattaactgttaagtatttcttttggactaagtcaccatgaaaaaattcctaagaaatcaagaacatttggaaacttctggtacacatccaatcactgtatatagtagaaatctaatcaccttttcagcgcaggattctgattttccccttgggaatggcaatacattccccattatcagtccatgcgcttcagatagaggtgactctgctactgatcctagcaatgggccaacttgagccaggctaactgaaacatcacagtcctcttagcacagtgatttgtttggaagcagatacgacttaattggagccaatgcatgagacttttcactgggactgtcgggaaagaggcaagttaattatttctaccaaacttgaacctggatgagctcccagagctgcagaggccactatgcagaaccagaaagtgaaagcaacataggaaggtcaaagctggagagggagacaaatgaactcctaatgacagagtcagagcacctatattccagtcacctgggaccacatcttcaacactacatgccattaccttattcttccagtatccagcacagtggatgtcacttagaacacaatactgtccatgaactagaagcattgggatcatctggaagctgtaagaaatgtagaatttggggcctcatccaaacctactgtatcagaatctgtatcctaacagcttatttggatgcacattaaagtttgagaagttatgacttagaaaaaatttaataaaaattaattgattaatttttttaaaagtcaccactggcactattttggtgcaggacctcaattttcttgattggattacaccaacagcatcttaactcttctctttcagagacttatttctgctcaatgttcaaattataacagcaacagtttttaggtttttccaaacagtttttaaaacacagatctgttcatgagaccctactgcttaaaccccttcaatggctcccagtggcttaaagaataaagtcaaaactcattagtataacatataaagaccccacagccaaacctctggctatctatagattcatttcccttcactccatcctttgcatttgctgcatctgccatattacacaacttgtagttatcgtgctctgtttcttttctgtatgctattctttcttgttagaagtcccccgcattcccacctttgctcactcaactctctcacattctatttcagttgccttacttgtctgaaaagaacgagagtctagcaaaatagtaaatagcatgggctttgagctaagcctgatgtttcttatgcagatagtctatgaaagtcacagcccttaagaattcctgatatatctgctacttaaatttgaatgcactgaagggcatttcacattctgacttccctttagtaaagtatttttatgcctgtaacttagggcccactgcaaatgcaacatcacagagtaaggcagagaacacagtcttctcaaggatgcagtaaaatatgtggaaaagttaacggcatagctggcatagtacacggtaccatgacaagtacttggattctgaggttggatggatgttggcttgaaacctgtctcctctgcctagcaaagaggcagctctgggatacagactctcagtgttctacaaaatgtgaataacatcttgctgacacataaatgtcatctccccttccttttcattgccaaccccccttttggctacagatccaactaatttttaattatttttctaaaagagaattaatatctcctaactatatatttgttacagtatagtttactgagagcctttcataactcgataagtttgaattttaacagtgattcaaaatcaggagtcattttgtcccccaggggatatctggcaaagtctggaaacatttttgattttcacaattgggggatgctactggaatatatttggtagagcccaaggatgctgctaaacatcctacagtaaacaggacagccccaccaaaatagaattatctggtccaaaatgtcagtagtcccaaggttgagaaatcctggtttgcagggtcgaatgcagaatttgcctgcagacttcttgctctcaggtgtctctttccaggaagctgttccaccaagctagaagaaacagggtcaagagtggtcacataggaagaagaatttattccagatgaagaaagggtcaaaggttcttaaagcacccacaggaggtgacaggacctttcagggaaaggtccaagtgtgcaagaggatgctggccctggagactcaagctctcagccttggcaaaaattcctgtgccctaattgaggcacagagccaaagagccacagtttttcaaggacacatgggaatttgggaaaaaattacatcagcactgaccaagatgaactaaagagagaggccctgacattgttttctgggtactacctaatacccttagttcttataggatcctggaggatgccattacgactgaggtttaacttcccacctggcttatgggatgtggatttaaaatcaaatttaatttgagtgatatctcttacaaaaatcagtgaaatactatccacatcccttacacattctacaagcaacagctaatggtggatgccatcaatataatccctcccaaaatgaatctgcatgtcttcttagagcatctattatattccttgcaatacaggcattacaggaaataaaataaactatgtttccttgccttccaaaaatgtactacagtggagaggaaaaacagcctttgtgtttaaacaaaagaagagtaaagaaaagatatatgaaagataacatcctaagtgggaaaaaaatttaggaagtcaggggttatcagtagtgtctcttaacccacaggtgtagcgggattagtatgagtaaaggtttttctatttgcctagatggaggtcaagggcgaccattaagaaaatggttcattagaacaggtggagtaaacatccccagggtgtcaaggagggagacaagcaaaggatgcaaaccatgtgtgggaagtttggtaggaaaggaaaggaaagagaaaatgttgactatatgtccactctccctgcctcgcccaatggcaagagatggcttttctattcatttaaaccctcatatggccaggccaggtcaaaatttttgcttagcagggtttccatgcagaggtgtggggaggggaaacatcatcaaaatattaaagaccatgaaaaggtggataatacctaagaaaatttctctaagacttcttcccagattgccctcatcacaatgaattctctcttttgcccaatcctatagcaggttctttttttttttttttttttgacagagattagccctgagctaactggctaactgctgccaatcctcctctttttgctgaggaagactggccctgagctaacatccatgcccatcttcctctactttatatgtgggacgcctaccacagcatggcttttgccaagcagtgccatgtcctcacccgggatccgcactggtgaaccccgggccgccaaagcagaatgtgtgaacttaacctccgtgccactgggccagccccaccatagcaggtttttaatttcctctttatagcatgtattccaaggtcacctttatcagaggggtgtctccatgtgtctgtctgtcctgccctgctagattgtaaactatgacagcaaagagacctatgtttctatctttgtggtttcgactgtattttaaaaagatgctttgtatggactaggccctaaacaaacaaaaaaagattactgaatgaatgtcaatgcaaaattacagaagaagttttatgtttctgaaggccaaagccattatcagaaattgagggttgaggggccggtcccgtggctgaggaagttcatgcgctctgctgcaggtggcccagtgttttgtcagttcgaatcctgggcgtggacatggcacagctcatcgagccacgctgagtcggcatcccacatgccacaactagaagaacccacaactaagaatatacaactatgtactgggggctttggggagaaaaatgaaaaaaataaaatcttttaaaaaaaattgagggttgactggtttcctaacataaacacctaggtctctaatcactctaatctctccacagctgtgctgtggtttgtgcccgtctatccagcacctggagcagctactagcatatgtaggtgctcaataaagatttgctgaatgagtgaatgagtggcaggatcaactcaaatgactataggagacctattgtgagatgttaaaaaaggaacaaatagataaactaaatcaatatttttattttaaagcagcatattcaaatttagattctggtcctacatttattaggcttctgctaaatgtcctagccttggtaaaactttgccatgaaatatagatcagatttagacatagcatgggtcaaattccatacccatcactcttcaaatctaaagctatgtagagaatctatgaagggaaaatgacatggtacaaccctgttatcatatgtgatgggtcttgattattcctgatatcaaccaaaataacaaagtaattcttcattttgtcatgttagcatcgacttattgattatgaaatattgtaaaatttaccttcatttccattattttttatgtttttctactaatcagaaaaaggtgcttatacaatctacattattaaccatagattttggcacacagtgttaagcagatgttcacataatttaaaggcacagtgggatgaaaacttaagggaaaacaccaatttcctagaaatgtgattaatcattagtaatcataaattgtacacatttctaaaaatcatgtcccaatctgcccatttattcaaagaaatctagcaactgaatccaaaccactgaacacaaaatatgttctatagcctttctaacctaatatcattactaataaatttatctttgattctgactcccagaaacaagagcaaattctatgaagtacaccatctggagaaagaagcaattttatagaaaaattgcaacatcctgtttgacaaatattaactaaaacagaatctaaaatcggtacattaataaatgattagaaaattcagagtaaaaggcaaaaattaccttacaccaaaagaaactacaactatttcaaatacttagtatggatatgcaatatcatcaattaatagtaactgatctctaaaaaagtgtatctgccaataaagagttaactatttactggagtgaattttttgttgatgttatttttcaaattcacacaattttagaagggtcggatgtttactggaaagtaaaggcctgaacacttccccttgctataattacttctcctgtcaagtgatcacactcagtactgttccactagattaacttgcagatggatttatccactcattcctgcgaggcttcaggttcctgttgaataaggaaggacaaatgcctcaaggaaattttctttcactctattggaaaacaagtcgattaaaatgcacaggaaaatgtgtttatgaaacaccaaaagttacaataaacaaaacaataggtggagctgtgtaagcagctttagcagctagttcactgtctgctggagggaaaagttgttgggattcaaatactgcctcagtgtaatatctcatccaattctttcttactcagtcaaggacacattctccatgggtgtcaaggggcaacgcgattcctttaccttccctttgctaaattccatgcttctgagcagaaggataatgccttcgttgctctctgtttcaatacactttgaaaacacatctacaaagtgcacggccttcaccatttggggtactatgggtgatcccttcttaaggactctacatcgtctcttctttgtccatccccaggtatctgtatcacaacctccatctccacctcaaagtatttctctgtatctcaccttctcaatggagtatatccagccactctgtttgaaattaaaaccaaccatcccaaccatccttatccattctttttttcatttgtttccccacagaacttaacatgttctaatatattatataatttacttactaattatgttattgtttgttgtctatctcctctggccagaaagtaagctccatgaggcctggcacctttggttattttgctcattatcatatcctaagcacccagaagagaggcagtactagaagattttcaataaatagttaatgaacaggatacagatactgccttggtttaaaagaggtgacaatagatgaagaataactacaacaaacaactgaatgtgttcaggaattttttggctttgtggttgtcatttctccctctcttcccaatataggaagaatatgaaaggaagaaggtagcaagggaaggaaaaacttagattaagagaaagagagagaagacaaggtagaacacaaggttttgaagaaggcaagattggtaggcaaggtattcagaatacaggtaaaggagatcaacaatgagctatgaacaaattactaatacttaaggatgattataacaatcttaggttcattggacaatttgttaggcaccagtagggccctagaaagacgtacaatgaccatatacaacatggtaagaaccagaatatacgtctgaacctgggttcgattttttcacatagatttccaaaattttaaatgacttggagccttcgggataaaaatccaagaccctggcagtgtatacaaaccatttcaggataacattctggcctatttgcagactgaaggttcagatcttatcactgctttcaaaacaatccatgctccagccacactcaatcccttatgatacctaaaagggtaatgccatttcacgtctctctaattttgcacttggtgttgcctcttcttagaatgtctgtgccccagagtccatatgtaaagcacatacaaattcatttgctaagcctccttttaaacatttctgaagattcctccaaacaccccaagttgatttaggaatgtctcctttttctcatgaagtccttgtttgtgtgtctgtcttgatattaaagtttgagccacgtagagcagggagtgtgtcaattactgtttacacactcggcaccaaaattctttctggcatacaatagcttttaacaaatatttcttgaataagtgagaaaacagactcccgagaaattgtaaaatcctaaaccgcctttcagaaaccccacttcttctccctccctccaaaattcaatcaggttcagttgcattatcatgttaaagagttggttattatctttcaacattgtaaacatttgcaatccaaatggaaagtataatgtatgatgtcattttgtcaaaatattcaattaaccacaagagtccgtttattgatcaaggaaacagattgttggtatttgctctcataaaatgggattgtataaataacagaggaacccctccctgatgtcttcaaataatacattcattttttttcctggaaaatgttcagacagtgggctcatgagcccaattttcctgaacatatgtagccattatccaaaaataagcttcactgtgtgtgtcaggaaataatgtgaatttgccttgatgcagggctccttgcccatttctattatttaccaggagaccccacaggagggagatatgtaaattaccttaacatacacccttcatatttctgactaaatgtgacgctgggaatatcctgccccaaagctgacatcaaaggatcatgttctgaatcttttagggacagattgcagcaccagcttaattcagtctaacattataaaagtaatttttgccatcagaaggggagtcactgtgaccaacaatgcattgatggagtaaaattgaccattgtaggctggatagcacctgcccctctcttcagcaacagatatttaaaatactttcatcctctgtaattctaacacaaagggagagaaatccttattagcaaccctgtcaagcagtgacaatgtgaatgagaaaaatttaaaaatttatgagaaagtgaaaatgaatcatttaaatataccaaaaaaatcctcacttgtgaatgatatccttgaaaaattacctaataatttatccaaaatgagcttctcttctcaaatgagtggcatttggcaggttttcttgcttttctctgggatttacaactaatttattaagcagctttcaagcaactgctctgaacttagggcttttgatccactgaaaaatctggcatatgtagtggcatcatttttttcttttaaaacatagattgactggtatctctacgggggttttttcgcttctttttaagccaggagaagcaaagaggtaaaggtcaaagtttgatcggttgagaaaaggatacaggagtaatttgctccctattgaaatcagcctctttgtttcctacccatgcaggtatatattggcctaaaaatatttagtagtccaattctggcttggtttctgtggagggcatcattattgtcttttagcattgagcgctagagaaacaaatgaatgaaatgtaagttagccaaatttcaaccctgactctacaactaactactcagtttatctagtggctactatttcaactctttgctagttaacttgcccttgtttaaaaagcaataataataactatacttcctattgtagtagtttatcaaaagaattctaataaaatactttgaaaactcttaggagagaaataaggaagcaatcagagcatgaaaaactcttaactgctgtatcaggaggcaaccccaaacagaaatttataaggcattaaattttttaagaagaaaataatgtgtaattcctacatagcaggatgctgtggatgttgatcaaatgaccatggtaatgatgggggaagggagataagtagtcgaaaggttaatggggtgggggcagccctttcctcacttcgaatgtgtgaaaatcatttctcagtttgattatggcttccatatataagtccacatcttcacattttaaaggagaaattaattcaagcttattggaagtggggacagagaagcagcacaaaaactgcattatgctgatgaatgtgcttgagctatgtgcaaattttgatgtgacttaatgtctccatgggatgagaagttatacactatcaccctataaacctggaatataccttgatggatttttgacataatatcctctatcctagatatatcacaaaggacacgttggttagctaaactcagtcctctgcctctttctacatgtgtcagttgttaggagcatgctgtctatggagtagaacagtgctggccttgccttgaaggatctgagcaaagaaattaagcaagtcccacattaagtaaggctttgcactttctgttcaccctgcctcaaatgctcctttccctgatattcacatactttctcttctcaaatattatttcttcagaaggttctcgcctgtctatctaaacaacagctccaatgattcctggtcttcatctctgttttgtttttctttgtagcactcaacactccttgacattgtatcatatttgtttactttttattgtctgacccccctacgtgagagcaggaaattgtctacttggcacatcccatatataatgtgccaagcatgtcagttcttaacacataacaggacatgaatcaatcctgggattaacaaatgaatgcctaaattataataataagcaagagagtttctcaaggttataagcatgatctagcatatcaggtagagcatgacacagtccatgatggatcagtgactgcaggggtgttaggctgatagtaggatctgacactgaaaatgaggtgagtgacctgggagaagaaggaagctaatagctctcactggactgcaagaggtggaaggaagtacagtaaaccaggatgaacacagtatccagggacaatggatgacagacctgcctccatcaactttagtacaccgcatgattgcggaaaagttacttaactattctgaacctcagattcctaatctttaaaatgggggaaatgatatcattctttttccaggttgcctgggcaactggatgtaaaattatagatctaatttatacagtatctagcatcatgtctgacatgtacttagtcctctataaacgggagttgttattattgatattactactccatagtagtagtcttaaaacactaatttttttttatttttccatctgctggtctggctcaatctaaaggtccaaatcaatttggcctcgagactagaagtccttgagcagttttatcgtccctctctggtatatttagccacaaataatctgtactattattctgccctgagatttggtgagccaatgctgattctttgactcctgaatcatgttctggctagcagtctttcttccttgtgctccagcttaagaacatttcagggcggcagggcacagtaaatgcgctaatatttcaacccacatttatttctttattcattctgtttcataagaaaagttcaataaccactaggatacccctttctagatgtcatcaaaaaggtaatcaactatataatactgtcatcaaaaaagttttcaattatatagtattgtcacatttcgcgcattcattaaataataaaccgtgccatttcatttttatgttattttcattcaacttctagtattaaaagtaaagagtgttggaactaactacacacactggtgattctgttttcccccttcccttagatccattctctatcctctgtcccgatttgtgcaccatgagtctcactctagagatgaatcgctcaaactcccttatcatgtcttttccacttggtccatccaatgggaggtactgagaggagatcagatccttggctgctttttcgccatggggccattctggctatggtgcccctcttccacagcaccaactctcaccaggctttggtaacactgttccctctctttagtcttttgggcctagggaatggctttttgctgtgctagttcctgagtgtgtcaccatcccttgttggttcttatccctgcccaattaaacatttaaaggttccatctaatgactgttgggaccctgattaattcacagtcattctacatacaattcagaacacatatttcaaacataactgaggtaggatcacctattcacatattcaaccttgtacataacagatactcaaaaaacgctttaactaatctacagtccctcataacgattcctttgactgccagtcacctaaaaaggttcttaaaggcattttatcatctctaattgctaaaaagagaagataacatttatgtaatttgattagatatgattgtctgattgtcaccaaattcagtggtatttttccagtgtttaccctccataactcttttttctgcaagacattgctcctggatctgctcttttttctcctgtttcatctgctgtgaatttctctgtttctgttttttttctctaaatgtaggtaatccctgaaaatgaagtcctaagctcatcctcgttagtaattccactggaactcccatgcaagtaaatggcttgatagtaatagtttctctacatgagtaatacctactgtataccttcacccctggcctctctgcattttcagaacctcttcttatttttcagagccattgttagatatccaaaaatgaatgcctaatattattaatgagttaagttaaaaaactgaacttaacttttcccaccccaaatattattctcttatttctattaatggaaactgtatccttttggatactcagagtcaaaagctattggccatcacctatgactgaactctctcttcttttccccacacactattagcagccacctccactgagcctttttctatttcattttctgcatccattccctcttctctattttcacagccaccaccttaagctacgtggccactttttgctacttgtattatcaaacaagaatttttttttttaaaaaaagaacacatttctcatatacaatctttttataataccaatattttgatagcactataaaaatagatgaatggaatataatttggaggaggtaaaatcagaaacataggtttggtagtttcttaagattaaatttcaataaccattataaaacttttgcacaaaatatatatttaattgaattcagcaactctgggtagagattccctgtgtatgtatgtaaacacacacacacaaatgacattatctccattctaactcaataaagtctgtgtattaaaagaaaaaaaaaagcctcagcagaagtgacatcttacaaatgaacttaaaaattcaggaaaagtctgggtgaaatgaaatcataaactttttaaagatagtttcatagaatatagagcatgcatactcaatagtatagggcaataactaggttttggaggtgcaaaagtctttgatattataagggtttgtggccctccgaaactcaatccaatgcaacaaaatcttttaccttattatttaatttctctagtaaggaggaattatatttgatataatttttctccccagggggaggtgataatgaaaaaaaatgaatgaaaatatagacatgtggaaaacatacaatatataaatttctgagttctctcattctactatcaagccaatcgaaatgaacttggaaaaaacagctgaataatatttcaaaaactacaacaaattagagcaattggaaccaatttttggaagaggcacctattgcttattatctatgaagcaacatccacatgtaaattccaaccgacaaaacatttttaatttgttcctcatcaagttctcttctgaattcattcttcataatgttttgtcctaaatgatcacctacaacacacatgaaataaaaacaatacaacattgtgtactggacttgtattatttttcaaaacaaattaacaaaagaactctttgtggctcaaagcttgaaacaaatattgaaaaatcaatttcttggcaacttcaattggccaaaacatctttgctctttgtcctatgtagcaacagaggactgtcgagaaacatctgtcagggaacacattttgaggacaggctacactcttggttcagattcactcagaacacggtaaacgtctcagctgctggaacgtgactggcaaagcaaactgcacagtgtttcaaagtcaatctgttctccatggatggaggggaagagaaagagaggtgaaaagtgtgtaatcatagaatgatttaaggaagagtgcttaaagaatgattcaggcatattctggattagcagtgagatatgagatactaaattttatcttcaggtttacttcactcaaagaaactctgattatttaaaaatacagtgtgctgacaaccagaaagttagcacatatccaagatctcagctcacacaacaaaacataaaaggtgtctcattcaattatcaatacattgaaagtctctttttttcccagaagaatttaacaacacactataaaatttaacagctttaattttaaattaatatgaatgagaatattttcctctaaatactgtttaattttgaataaaataataatttctaaaaagtcatttaatcattttgtaactggcaattgacagatactcttaaataaactgacattttcaaaaaattagaagccatggcattttcagaaacatttctgtagaaaaatattatttcatatcttttaaaaatagaaaagaatgcttacataaaaccttgctttacactaaactttccctttcctgcccctaaataagttccatgaaaaacctagtgccagttccagactggtacagtcagaactctgagaacccactactcaataaaagcaagaaatgtaacggcaaaaatagtcaaaattgacttttagaaaactatgaaaattaaccaaaggcttgcaaaagcccaagaacttattcaagaaaaacagctaaattttaataaaagtagtaagatttgtagtgtttttaacttgtctttcagtatccccctctgcacagctccatggcaggcttggaaaccagcagcctcacaaccatggtagttgtgaaaaaaagcaggccccaaagatcaggaacaagacaaaaatttctgctcttgaacgctgtactagaggttcttgccagggcaattaggcaagaaaaaagatataaaagacaccctgattgaaagggaaagaattaaggctacttctatttacagataaaatgatcctgtatatagaaaatcctaaagaacacatacacataaaattagaactaataaattcaacaaggttgcaggatacaagatcaatatatatttctatacacctgcaatgaacaatctggaaagaaattaagaaagcaattccatttgcaatagcactacaaagactgaactgttttggaataaatttaacaagagaattgcagggtttctgcactgaaaataacaaaacatccactgaaagaaattaaagagcacttatataaatgaaaagatatcccatatccatggaacagaagacaatattcttaagataacaatattcccaaaattgatctacagattcaacccaatcctgataaaaaatcccagctgccttttttggaaaaattgacaaactaatcctaaaattcaagtagatatacaagggaccaagattatccaaaataatcttgaaacagaacaaagttggaggacttgtacttcctgatttcaagctgactacaaagcttcagaagtcaagacaatgtggcattggcataaggataaacatataaagcgactgaatagaattgagagtccagaaataaacccttagacttatgggcaactgacttcaacaaggtgctaagacagttaagttgtaaaatacaaccttttcaagaaatggtgctgggctaacttgctatctccatgcatagaaataaagctggaccccacaaaccataaacaaaagttaactctaaatagatcacagaactaaatgtaagaactaaaactgtaagttttagcagatacatagaagttaatctttgtacccttggattaggtaatggcttcttagatatgacaataaaaatacaagcaactacaaaacgaaaaagataaattggacttcatctaaattaaaagcacttgtcctataaagcatactatcaaaataaaaatgaagagacaacacaaagaatgggagaaaacattagtatattatatatctgataagggacttgtatccacaatacacaaaaaactcatatctcaataataaaaaaataaataattcaactgaaaaatgggcaaaagctctgcatagacatttctccaaagaagataggcaaatggccattaattacatgaaagatgctcaatatcattggtcattagggaaacgcaaatcaaaatcacagtgacataccactttacactgagtaggatggctaaaatttaaaaagagagagagacaataacaagtgttagtaaggctgtgaataaactggaaacctcatacattgctgattggacggtaaaatggtgcagccacgttggaaaacatattggcagttcctcaaaatgttaaacatagagttcttatatgacccagcaattctactcctaggtacatacatggagaactgaaaacaacaattcacacaaaacttctacatgaatgttcatagcaccgttattcacacaaaggaatattattttgaagtaaaagggaataacatatggagacatgctacaccatgaaagaattccgagaacatacgctaagtgagagaagacagtcacaaaaggccacatattatgtgattccattgatatggaatgccaagaattgacaaatacgtggaggcagaaagcaactgtcaagatcatggaggtagggagaaggagaggtgtctgccaatggctaccaggtttttttaatgagatgatgaaaatgttctaaaattagacagttgcgatgactgcacaactctatgaatatattaaaactaaattatatactctaaaaatttaattgtatggtatgtgaaatataccttaatcaagctcttataaaaaaaaaatctagtgccaaagattgacataagaaaaagccttagtacagtaactaacatcatatgattcaaggaatgttagctataattaactgtaattactatttgaaaacacaaatgtatcaaaattgatttttaaattatcacaccttaatattgtacatttagtttatctttttcgagatgaatacaaatttttaaccactgcttgactaatttactcttgaaaatccataatactgatttcataaataaatatcattttatagcaatagtcataaaatgtacttcaaagccttagagctattctctgacacaattttcttttgtctccaaataggactgtttttttcctggtgtcatcataattttctttctctgtaatgttgctccttacatgaatgtataaaaatccatatggaattttactaaaaattacacattaagaaaacatgcctggtgacacaaaaaatactgagtaacaattaaacaaccactgcctctaatagtacttttggcaaaaatgcagaaccattttataacatagagtcatacgtccattcttaataaaaagctgaattttgggggctggcctggtggcacagtggttatgttctcacgttccgcttcggcagcccgggatgtgctggttcagatcccgggtgcagacatggtaccgcttggcaaaagccatgctgtagttggcgtcccacatataaagtagaggaagatgggcacagatgtttgctcagggccaggcttcctcagcaaaaaagaggaggattggcaacaggtgttagctcagggctaatcttcctcaaaaaagaaaaccaaaaaaacaaaacaaaaaaaaaactttattaaaaaaagctgaattttcttacatatcgagtttaattgcctacagcaagttttatttgtctgtttgtttgtttttggtggctttcttacaggcttacattgaagacagctgcaattggataccaagttttaatataagcatgagaaccagtcttggctaggcaactttttaaatttacgtatacatctgtttccttgtcaaaaagtgcactacacgatctgcaagattttttaactccatgaggtcaagatttgacatctaaacttctgaataattattcttttagtatgaattaatctttaatactatacatgttcctctcatatcatcatttttctggataaaggaagaaaatccttgcccaaatcaatgaagtcccaaaaccaagtgtgagaaattacagtcagtgagtataggccaacaaacataaataactatcttgaaggattatataattattatgtatataatacttcatgctttctaagtgctttaaagctattaattagctttcctttcaaacatgctgcgaatcagcaagttattactctccctaccttgtaggataggacccaaatgaaaagaataactggtttctcaaaatccaaaactgatgctgcattataaatgtggaacaattcaccaacagtgctaacaacaaccacatcattatcaccaaatacattatttttacttcacacttcgcacaatcacatttaagacttcagtggcatttggagaccttaacccaacaacaggttcagtgaggagaggagtttggtagacccatctgactggagctgtgctgtctcctagaatgtcaatttatcctaaactagttgaaaagaaaaatctatacaatatttgatgatgagaaaaaaaaacacaaaataaactgatcattcagctagatttacagagccaatgctgctaaagttgtggttacagaggtgtaaaatgagaaagtttgtagagcagtgctaaccttgtaaggtttaaatgagaaaaaaacaaaacaaaaacctaactgggaaaagaaaaagaaagatgcaaagaagcaaatagaaaatgacaaaattagagtagccatagaatttgatgaaaacataaagaaggtgggcaagccaagaaaactgtctctgaaaggcagcctgtgtcatttttcaggatggttgggatacaatgaaataatggcaacatcaactagtggagctgattatgaccctaagcacattattaacaggcaaattattagtacctgtctgactatcttcactgcctaggaaaacatcaagaattgctctgtccatgtaccatcaagtcagctcagactgttacagcaacaataggggcattttctatgaaggattcaaagtctgagtttgacaggtatgagcaaaacccatttttcaatccaaacatatgcttaattggtatgtttagatcaaatctactccatgattttactagtatgctgatatcatccatcagtcctcagcacaaatgctacctccaatgtggagacttccagacagtataagctgctctttttcctatgcaataaacacacttagcaaatatccccctcaaagcaaatctctttactgaattacaatgcaatacaattttttatgttcatcagcattataaagcattataattattttatcatagttacacaccatagattaattatctcatttcacataatttcttattacacttcttttacttaagttataatatttgttgacatgttggtccccctgatggactgtacatttcttgagtagtccatgtcttttcatccttgtattctgccttccctaacttaatgcctattataaggcctaaggcacagttaacacccaataatatttacagaacgaatgaatgaatgagtgaatgaatgaatagatgagagaatatctccagccttaatttcttgtctgaatgataagctattttctatctactggatgtgtccaggtgcagatgtcggggcatgttctattccccatattctcccctattctccagcttccttaacttggtttagcaacatcatcgtgaataaaccaatcaaagactctctgagtctctgtctccctctctctgtctttctcgtcttccctctccccctaccacatacactcatctctctgggacactcttattctcagttcaagggccagctcaaagtcatttattcattaatgtatcatcattactctatcacagttcatttttaggttgcctttcctgctgaagtgtaaattcctttgtcctagagtccttattttgctttttgtttttgagtgcatagtgtcccagaatgcctggtacataactgaaatctaataaccattttgtaagtgttttccttaaaattctgcatatctcaattcaatttttcaaatatgacttgtgaacatcctattccatcgtatttattgcagcaaaaatgggcaattagagctagataaagataaaaaaaatcaagctgcaagcagaaaatgtagtttattaactaactattttgaaccttaaagtagattttaggagtttggtatttctcaacctttttaatttcaaaaactaattatttgttcaatactaaaaatattaagaatatattcctccttttttacctaaggggttttattctacttgaagtgaaagagaaatcatctaagagttcatattactgggttcaaattgaagcattagcaaaatatttttacaccccattcatcaaattatttcacttgtccggatagtttctcacctaagaaagaagttattgtactctcagtagtgttcaaaatttatctattgaatcctatatttattttaaaaacattcaaagaactaaaggagacattccaacttgaccgccactccccttcccctccttggaaatccctggggtagttccaaggaacccttagtttccctggaacacactttgatgatcactgcactctgtagagtcctgatagctctcccattctacaactctttgatgtagagtaggctctaaaagccaaccacacattgagattgttcataaaactaatatgtggacctaagattaaaatttaaagtccaaatttgtaaaatgtttcaggctaatatcactcatttaaaaattccaacgtattcgaaccaggcaacatgggctctgctttgacagaaatcagagtgctataattcaaataagatagatgatgctaattaggggagtgggcagttggtgacaagtgctgtatggtttcatacaattttaaagatttgatacattataagttaaattatacttgcaacattcattatttaaatttgagttacaaaaaatttttttaattttatcacttaagcataataagagagttttgcctaatttccagtgaaatgaaataagctgtttctaattttaaagcactttagcaacaatctttgtctattaacaattaacccattaattacaaataattcttgccatatcattaaaaaaaggaagaaaaacaattattcaatgttacttccagtcttaaaggtagtaaataaaagcaacaaagttgcacttaaccattttttaaatgaatttttacagaatttttgtttatgtacttataagatttcaaccagcctagctatcgatattatataaccaaactcatttatactaaattatgaagtttcattttataaccaaactaaattagtctcctggaaaataaataagcagttagaggggaaaaggtatcattctcaattagccagacctctgctggtccatgtttaatgtcataatacaataaaataatctggcaaatgttactgttaggaactagcttcattagaaaagtcaggaaaagctgtggctctgcatgtcctcagcatatacgtgataattaaagccatatgcctcaatcaatctggaaaaaatatgaataataggaagagaaacaaagaaactagcttaaaaacctgttgtttggaatggttcaatgtataactatatcaaaaattgtgctgcatttctcaagtttaaatttaaattttccggagacagttatcttaattcctaataaaatgtttgttaagacaaatgtaatcaataacctatgttttaatctgagcgtctcaaagtcaacatcatttaataagcattccttcatctcatagaacattgaactatgtggtttggggatagcataaaaaagaaaaagaagacacaatctaagaaacaattagcatattttgtaactggagagccagaactcattcttgcactttaaaaaaaaagcttcagaatgctttcaacatgtcatacaaataagggcaaattaatagagcaaaaactgagtagataattccaaggagacttggaataagagtcacttagagttcattaagtcttaccaaaagaggttaaacctaagccaggttttgaaagacaagacagaagtggaatggttgaaaagcaaagaaaaaaatgcatgcaaatgaaaacagatccagaaagaattaaagctcaaagatggaaatgagcaaggtgggtagctatgctttctggggtagagaaatccattttgggactagtacaattaagaaaatttagggcctgtgaccggatttaagagagttaaatgctcttctaaacatcagtttgataaaattagccaaactgagtcattatgcagtttttaatagagagagaaacggtttgatgggaagaaaaacaacaacaaaacaagaaacactagtgtcttagaagagctatgtgatgatcaaaattattctaaaatatatttagatagatatccaataactttacttgcagactgaatcatccgtaacatggaattatccttacaactgtaaatgtcagaatatgcagtttattttttatgctatttatactccagctacttccaaaacagatttttgaagggcacagatagagtaaaatcataaaagaacattaaaatagtaaatgagggtgagcaagaatatagcaggaacacttatctaagaaaagccactgccatttaacacaaaactgagcactgaattctggtagccaaagcaaaagctaagtaagatgaattctttcattcctttatttatcccaccatgaagcaaatatttattgatcacatagcacgtataaaattatagtcaaatataatgaaaaagactagctcctcatgagctcattttttctagttttgaattcaaagaggaatttgttgttttgatatttaaatgagagacaccaatcagcataaggaaggaacggtgtcctttatgtcaaaattacaaaaatttcaaatgttctacataggactatttcttaaaataaactttgatgaaacttagggcaaaatatttgtacatatcatgtaaaggcaatgctttaaaataaataatgcaggtatgctccattttagtaatctgacaagaattcagatgaatgaatggtgtcctttatagcaaaattacaaaaactgtaaatgttcttcttaagacttgtaacaaaccttgataaaactgaggaaaaatttctggttatatttatgcacaggcaaatgatgtgagtaagctccattttggtagtctgatgtaataatttggaagaacgaatgatgtagtagatatatttcagcatattccctacatgcttttcagcatattcccagcatagtccaaactgacaacatgttcttttcttgttcttcttctttttgttatctgtcccaccttacccctatcttctccaatatatacgagtggtttgtatttcatgaccctgtgccactggccacagttatttggatcagaggtggacatcagactaaagctgtcccataagacgcttacttaccagagcatcattctgaactactcttattgagtttaggttattcctttaaacagaagtgagataaacttgagagcagttagaaagccatcttgtaccacgcttctctttgcacttggtgaaagataatatggaggaagagagaaagaaagggaggaaaggggcaacggagtgagggaagtaggaggggaaaagaacttaggaaggggagaaggagagaaagggaaaaggaaagggagaggaggagagagagaagagaggaagagagagaaaaaaggaggaagaggaggagaggagaagagagaaggaggaagaggaattgagaaagagacgctgcctggtttccaatagcttttcaattcctgattctattttcagggcttattgaggactggagtgttttgccttttggttacatctttctactattttaaaggagcttctaaacagaatatccccataatcactgcctctgctttaacaccaatggaaggagggcagggaaatgcctagtcggggtgggtggcacctcaccaatacaacattctagctcatccaaattgcctcactgccctgggaacataaaaatagtaaaatcggcactgtcatgcctggatggtgaccctagggcttctactccaggagtctcaaatgccacgtgacttgttcctcagactggtttgcttgtgccgtgatgactggccaaacttaggtattttcagcaagctccatttcacgacccttatgttcttacttctcattcttccccacaactgctcacaatcttattatttcttcctctctgtaagtgttaatgcttctgcaaaattttagtcatcattaatcaaaagttctccaaagtgctttaaaggtcatgttatgaacttacaaattaaaaacattgttttaggtataaagtaaatgattcaataaatacaaattgaacgcatgctatctgcaatatattgtgaaaagcacatgggaagaattaaaaaggaaaaatcaacaatgcactatgttatggtaatacttcaagtgatataggaacttaattttgcctataaacatttctgtctacttgtttttcctacaataatttgactctcccaagcaaacattttttctgtacctaactggcatctaatagccaactgaattggaatggaatattcctttttccataggatgtcttaacaagtctattttggctgaacccttgcaactgcatacatactggattctttccctcttctgcttcttttgcagaaaaattcagaataaaagctaagatttaaactgatatctatgtgtatttgccataatctaaaaaaaaaaaattgtttttgaatcttgtctattcaatttataaagctaaagctctcactttctattaattttaaatatgaatatgtgtacatataagcatttattctgataattgtttccaatcctttaaatgttaatgtcttcatccaaagacagagtccattctcttcttcatcgatattactctcttcaactacacttaaaagaaaaggctaggttactcttgcctggaaaacaagatatcagaatcttgatatggataaatactctggaaatcgaagatcataatatgtttttcagctgaaatgttccacagagaaaatcacattgttaatgtctgcctatgtgggggattcccgctctaatctccaagtctctccactctcacatagagagtagtactttcaaacgttataacatttagtccttttacctgcaaaatggagataataaaaggacttgcatcacgggattttaacgaggatctaatgatgtatttctatgaaagaactttgcaaactctgaagcatctataaaatggtacttatctacctaatccactgatgtggaagattcttcttacaaacatagtatacctaagagcaatggttagaaggtgacgccatattgacaaggggcaataaagagcccagaatgctcaataccattagtctgtgtatccctgaaaatttatcattaaagactataaagaaaccctgtgctatcaccatggggaattgaaatgaggcttgaacattgactttcttttcctagagctcattctggggcataagacataaaatataatgactaaggagaataatgcatgataattcttaaagaaatagtatcactattaataaacactataggatttcatttcagagcagtttcatagaagtgagatataaatctagactgtgaagaatgactggattaaacaagcagacagaaagacagacaatatgataggcatggaagccctgcattcagaaagggctaaattgtgaaggagaggttctggggagagaagaaagcaggaaacacaagccgggaatctggttggcatgcactttggaggatgctcctgtgttcttcacacttcgtgaatcttccctcgtgattccaatccagtgaatgggcaacacgtgctatagagtatgtctcatggattctctcagaaagttatctaatctacatagcctaatggggtcctagagtcagggaacattctccatgtgtttaggtctcttggccacaaggtcagaagctagccattgcaagcgaatgccttgaatggctggtaaaggcatttagattttgtggcttctcattttctacaaagcttacaaacggtgtggccagggaggaatttcccgctactagcagaggcaagaggtagtacaaccaggtacagagaaagaaagcaaagtggcagatatgaaggacaatgtggatgaaacatcagcaaaattttggtaattaattgactatcaaatgactcagtggtttgtagcctgggcttctaagaattttgggctcattaacagaaacgagaaaaccccgaggagaagatagtttggaggaaaggtgataagtttggcttttaggtgactgagtggagttgccttaaacacaggcagacgggcacgtgtagcaaacagtcagagacaaagttcacatctggaactcgaaatacagactggagtgggacatacagatctgcatatcatgtacataaatgtaacatttgacaaggtaaggcctagatattagtgaagggtgaggggaaaatgaaaggaagctcaaaacagaagaaaatccttccactaacttacaaaaagagacgaggaagagggagcagtgagggtgaagaaaggtgattaaagagaccactggatttggtgataagacacaccaagtggatttctggaacgcaatctctgccaagaggcaggaagaagagtgagtgtgtgggatgagtgaatggaagacaagcagatgaagggaatcttgagggcaaaagagacaggacaaggaaaaagggaaaaaactgaggatgtgcaaggaatggatgagcaactgaaagaatatcaagggtaggacataattagtgatttccaatgttatagaagctctttttgttctgagacaggagaggaggaaaaaaggctagagaaaaatagaagaaatacttcaagaaattacgtcagatgctcaccgaagtagaaagtatgagaccactgctgagggccagaagtcaaggttttaatggagaattcttagggttcagctgcatcagaaggcacttggggcgggggggaactagatcaggaaggagaggtggaaagaacagggtcatactgagcctaaaggacaggctgagcaggcatgaggaagtgggaagggtggatatggtggtcaaaaaggagcaccatctctctacttcctaggctttacatttacattgccagcagagcagaatgccaactgctttgcagtatcaatattttgtgatttaaattaaaatattagatatatatgcaacagactttttgatatttgcacttgagcatgacattataagatagataaatggattattatctgtagtaataataatagaacagtgatgttcaacgtactttatgtagcttagattaattttcacaggtattctaagagctcagtactattattattgccattttacatcgaaggagcccgtggcttagaaaagttaagtgacttgatttagattatacagacggtaaatggcaggccagagatacaaactcagggatggataattccactgggatatcaaggatcctcatttctgctcagtgagagaatagctacagattgcaactgagaattgatgtgcactgtgtgacgttaagagggaactgaatgaacatgctggagctagcatacagcagttggtgtaaaatagtcataatatacaggacaaatacataaatagaccaacatatattcttctctatgtttatcagcatattttccctaataccagcctgacttataattgagttgatagaaactgtgtgtgtctacacaacagatcaataagctcactgctgtatatggtgactacctccctgaaaacaggcatccggtgtgaaagggccctttgatcactggtggggatcgcaacaaccctgaggactctcacagccctcaaagacctgctggatggccatgcctaggccttgctaagagatgagaaacatctttatcaggaagaaattccaaaccagggctctttgaaagtattctcaagaaggtttttgggttggttggtttgtttgttattgttttttaagtgctgacccaaagccaggacagcgctgcccccttaggctctaaaatcagaaaagagaatcctgagaaaatgatgactgacatggaaacccatttgcaaaaccatttcattcaagccttcaataatgtttaatgggcgcctaataagtgcaatgcactggctagacaacgcgatcctggccctcacggaatttcagactggaattagctaaaaatcccacatgcaaaaaacaaaaataaataaaaagttaatgtagattttaaaacatacaaataaatacaattccaaacttcattacataaaaaaatggcattaccattgttaagctacaattttttccaaagtaaatatcaacaggatgcatccaccattttccaaattcaatacctctcctgcttcacatttcaagtcagatctaaaataacagttaaaggaaaagacctgaaagacatgagcaattttatagtctaataatcacatctcattttaccacctgtctttgaaaaccttcatagttttaaataacatttgcaagcacaataatatttctgtacttggacaatgcactgtgtaacaaacttgaaaacacaggaactacttaagagaaatatttagattgtgtctaatttagatagatagtccactgggcaaggactgtgtctaattctatgttaggtacagcacattgcaaaatgttggcactcaataaatgtaaaataataacaacagtcttttcccctttaaagtatataattacatctaccccctactgtgtaccaagctcggtgacagatcttttgtttattaactccacagccctgaaggcatacagtattgcagcttcaatacaaactgcagtaaagtcctctctactttaggtaaaactttaaatgtctacaaatccctaaagaacatcttaatttagccgtccaccatcgatattacttaaccaaatgcaggaaaccttttctaagtccccaaagtggaatgcaaacacgaagtggaaatgtgttctcaaagttagtttggaaatatgtcatggcataaaattactcttagctaatttaccatttctccctcctaaagaaacatgtcaagctgctgagcaaagctctgaaggctttatgcggggaacattcactaggttcccatgcttgtgttcaaagtgcgctattatccaagtagcctgaactgaggaggaaaaaacagtgactcatgtacagctttattagagacatttgcactacaatgaaccaagcaaagcaacaggtcaagttaaaaaatattgcaaaaagcaacggcagccgaagccccttgaaggggaattcgggactggaaagcactttcgcttcgtttcatcattattttctcctagtttcccgtgtttgtatttgaatgcttgcacttgaacattagtttcacaatcacctattctacatttggtattgatgaagttcaacatatgctctgcaattcactgctactaaaataagaaatgcaaattcagctaagtacgctccaagtctaatgttaagctgggccggagttcctttgtagtttttgtagagtattatcattagtagagaagggttaatggcaaaggccgatgattgtttaaaaattcacattaccaaagtggattacattgcatctactgaggggatcaacaatgtaagcctacactaagccattattgcagaaacaaagctttcattttaagcctttggaaacaagcataaaatggacaaaagaaaaaattcttctgatgtaagaacaaggcaagcactacatgcttttcatccttactcagttttagagccaggatgaatgtgcaaaaaatggaccatctccccaaagaatgcatcattaaattataacatatcagcattgtggaaaatgctgcttctctatagctagaaatccaacagacattctttatttaaatttttttttccttttgttgagaatcagtcacaacacagagatgtacattctttaggattgtctcaccctttgttcttttatcttctaatgagaagaaaaaaatgattctgaaagctacattcctgcagccagtgtcatagctgacccctgcagcagcaattcattacaaacagtgtcagactgtggtaagtggatgccaaaccaccagttactgacagccaccgggcctggccagaggctagatgtacttgacaagtgttattttccacaacaaacttggaaacgcagtaatgatatcccatcttacagatgtagaaactgaggctcaggatggttaactcactcactctaaattcccgaataaaaaacaaggattcagactcaggtctgactgaaatgacagctcacctacgtcccattcccacagtgccttccagggacaactggagttcctctaagtaatgttcttttaataaattacccgcaaaattctacatgaaactgaagactctctgataaatttctttttctttacaatttgagctcaacaatgaagcatcttttcagtgtattagacctaaatatactgtgtcaccattaagaacatgtgatacatatttggaaagaaaacctcacaaactgtaacaccttaataaacctaaggaaatattatattatgtcacatatccatggcaaatcatctaacacctttaattcttcagaatatgacagagaagtagtaagaaaaacaaacaataaataaataaataacaaggccccagcagtcaaaatacttcatgcattttgcttcctaaggccaaggattttacacataggagacaactgcaggccctccttctgggtctattaatacttattttaaatataattcagcaaacttggttatctgctttcgttgctcattataaactaaaaacaatgaatttgaaaatagaaataattcctaaagataatgaaaaagcccaagtcttgccagaaatacaaaagaataatgctacccaaaaatattcacaagaattaaaaatgcataatatacgaatggatgctagggcataggtaaacaaaaaatcacggcagtcattctggtatcagtagatttattacaaaagaatatataataagatataaatataaacatataaaataatatattttattgttatattaagtaatcatactaaatatattaaacatatttaatatattttgttatataaatatataactttatattttttgattactatatatttaaagataaacatacaaaaatataactataatgaaatccaacattttcacaaagagaagcctgggaatatatgtctattagaagacttttttctgcttcaaattctgggcttaaagaatggaagtttcattagatggaagttgttttaatcagatgagtctaagtgaagcttgttaaactagaatatgaagtccgaatatacagggatccaacaagtataaggcccatggcggccatgtctatcatacgtcaaaatcgtcttttatatcctagatattatttctttaacacatctactggtctgtcagtgagatcacaccttttctctgtctcctttacaaagtatgtatttaagggttaggaatgaaggagttttgatctttgtgtaaaagttgataatatgtatgtaataaaaccttaatctatggtgaagagaaaaaattaagtgacatggaattgatgacatgtttataacctgtagaactgtaaactccttgtaggtaaaagacccatgaataaatctatgcttcccctacaaggcttagcaagcaataaaccctggaataactgagtgaataaatgcataaaagttcattatgccttgcccagctcaatttttggagaggaggaggaaaccagagagaggtgacttacgggctcttactatccttgcttggctgactcccactatgcaaagaaaatagaaacccaaactaagcaggaaaaacatttctggacacaggtatctggcatgcaatagccatcaaagtgttatatatataatcatcaataacaaacgcaactatatagaaagagatacacatacatatatgcatgtgttaaaagcccttggatatggaggtctcaaatgaatttcaattaatgaatgatggaaatacttactaaacacctactataatacaaagtattacagtagattctgtattggactccacactgaatagaccaatgaaggcctaaatagaccatttttaatagcttgatattttaattttcctattttttctttctttattacaaaattatacatgataactgtaataactcaaataaatcggaaagaaggccaagtgccgtgacttcacatctcccatcaacaacctccacactgaggtaacaaatattaacagttttgtagatattcttccttatctttctctatgttcataaaacatcttcatatttgaaataattatgtatacagaactattaaaacaaaaatgtgatcttaataagttcatcacaagcatacgtgcttttctcacttaacaacatatcacagatatccatgaaggtcaatgctaatagctctaagacatttttaatatctacagaatggtgcatactttgagttcaccacactttgttgtactactccattgttgatgaaaattcatgatttttacagattttttctgtcacaaacatcgatgaagaatagccttgaagactatgttatgtgttaatgcatttgtgttgaaacgtccctttattgaagggacttgaaggttttttcctcctagctttttgttattacatacagtaacatgtggaaaacatagttttacatatcggtacccttatttctacaacacaggttactaaaagtgaaacagctgaatcaaggatatgatcacatttaaaaaaaaattatagtagctaatacagatcactttccaaaaaagtgacaattcacatccctgtgtagaactgtgcttattttccccataccttcaccaacttcgctggataatatcagtatttttcccttttgacaattttattaacaaaacactggatatccttttatttgcatttcccatgttactggtgagtttaggcagctgtctatgaatttattagccaaatgcatctcttctttcatgaattatgtgttaatatcatttacccaattctcttatattgtttgtctttttggatcaatccgtaagacttctttttatatgagaaataagtaactcccatcctgttctacttttccttctttccattagttaataggaatgtgtacatagtgtgaaccaagaaaacagtcaggactgctggaatggtttaaaataaacattagtgacaaagaaggaaagtctgcaatattcactttctaaaatattaagctccacaaggacaggggtctttgtttttttaaatcatgactctcaagaatctagaacagagcctggaaaacagtgggaacttagtaaatatctacttatctatttatttgatatagaaatgtgttgagtaaatgtgtgtatgtatatacgttaacctctaaaactgtaaaacatttgctttccaagtgggaagaaagcttgtctgtactgtgccatcatttagtgtttctaatacttagcacgtcttgacatctcatttaatcctgaggcagatattattgtttctgttttacagatgagaaaatcaagactcagaaagttgtcaaagataacacagccaacaaacaagagagctgggatataaattcaggtttttctgataccagggacagatactttccattatgtcaccctgcctatcagcatgtatgtctgacctgggattggcagaaataatgtttatcacctaattttcaactttaattgcccagggactgagaaacattctaagatttacaaaccaagaatagcattctattttcagtcataatacataaaatatctattttgtgaccctaaaaatagctataaaaacatgggctctaagacttaagcagtgaaatggacaaatttaaaaagagaaaggaacggaaagctaaaagtaatcagaaggctactttctacaaaaagccaactattgtgccaagagactacaggagaatatgatgaaaccaacgtggtttatgaacaaaatcctgcaagtagtctagaaacactacctcaatcatagaactgaaaaatctcttaatcatgtcaacttctaacacaatcatacagagattgtcaaagaaacatgttgaacaacaaaagcataaaagcacttcaggctacaaaataaatttaataataactcgaaataaggaagacataaactttattagccaagtttgtgtgtgtgtgtgtgtgtgtgcatttgtgtatgtaaatcaaatcgcaattctttaaagggacaattgcaaaaaaaaaaagtatatccaaactgttaagtggcataatttagcaatttctactgcataaaatttgattatcattgatcagtctattttcaacgactccagaatgttcttattcatgcagtagaatcattaagtttcttctttcattttttaaaagttatttctcataacaattgccagagattattagtgatgggctatcacaagcttacctatgtgtttatagttagcagatgcggtaaaagaaaaacttccccaggcaaaaatgttagttttttttttttttaacattcagactcagtacagtttatttatgtcaaagtacagtacaactctctcagctaagaatctgacaaaagcgagcagagacacaaataatgcactattggtgaaaataccaatgattatcacgtttggtggttggtggctaaagtttctgctagaatgcaatagtgcctaacactattaaatgaaaattcctcctacccaaaagccacatagtttgctgcggcaatccaaaacctttggtattattcgttgatcagggggagagctcttttctttttttgtcaatcttccatgtgagagaacattcttagaagatgataaaacttgggttaagggttaatgttgaccaaacacattttaaatagctgaataataacaatccctgtgttgaaaattcagcatcaaaaattataatcaatttcttatagacagaaccccatggaaattactactagaataatagttaattattaaaaccaagaaaacctgttgtaaatttttccttggaagagagacgcaaatatcaattataagttgtacgctaaataatattttgggttttttccctctaacgtgtattttaattttatctaaaactataacatataatttctataacattctatgaatggaaattactcatgaaaatgtctggcaaatgttaaataaaaatgataatttaaaataatttgtacttctctgtgatataaatatttctattgtcaaaggatacactatatctcctcaaaatttttataacttttcaacgtaaagttacaaagtatatatgagacaaataaaagacaatttacttttcatttgatgagaaactcatatgatttaatcatgaaaagaaacgcttatttggtaatacaaaataaataatttctcataaattcattctaatattttatcacaatggcatttatgtaatttttgcgaaatagtgtcaatttaataaaccactgacacaactaaaactgtaacattctttcataggagatatttctaggagttttaagaaagtttttatacaagtactttgtttctttctttaggcttttaaaagatcttcacaacaacaaagacacgtttattttacagactacaagaatttaaatggagccaaatttgccatttcagtcatgaggggaaacaccaaacgttgctcctctgagcagtagttctctttttgactgcaagaagctgcagaggtcctgttgcctcagaggagaagagaatgttccagtctcacctctggtccgtccagccatcccagaactgcctccctcctgtgccatccatcccttctccaaccttctggccaagcctgcccacccagcaaactgtgtgtaatggagagagaggagaggatggcaagaaacagagttcccaagacactctgaggaagaagaaattataaaatccttagtatttcactaaagaatgaacctagtcacaccatcatatattgtatgacagttttaaattataactattaaactcttcttggttcacattaaaatccctaaataagtgagtaacaaaaattttccatactgtaacttaaaaccagatatttaacccagttagtggaaactcaatatctgatcctgtaagaaagagtttcattttctttaaaataacactctgagaaactgttctgaaaatacaaacttctcatgttgcacacctaaattgtcatggtcataaaatgagactaaattctttagctaatcttattcatgaaatatttcgtgtgcttttagaaaataccacattgtggctaaacaccattattccattatgcctgaaaataaccaccggcttacagcagtaaacaattcaaattgcattccctgtattagaaagctaaaatgcttacagaaatagaaccgatattgaaagcccagaaaaactcaacatgctttcatctgaataccaattcaagtaacttattggatacacatttatagtggtttaatagggtaaattccaaacaaaattacattaattttgcaagcaattaagcttcaatattctgtataatttactaaatagtctataaagtatccattctcaattataatagtaaaacacaagaaacaaaaccttataacaaactagtacccttcactgccaataatgaatggtatgcaatataagtttgagaaaaaattagtgaaaaatttaaaatccaataaataagtttccatactaacttgtatttaaaatacaatcagaatgcccatctacaatgtaccaagtcttatactaagatcatcacctcatttttaactgataacactgccatccaaatacaatgtaaagatattcaaaattatttcatcacactttcaaaaagttgttctaagtatttacctgtaaacataatatctgagggataatcttgttataacaccacggttttaaaatgtagagtgtcaagttcaaaactattttctaatttcccaacttttcctatacatttatttctttttgttttttggttgggaggagaagggtaaggaatactggccctgagccaacacctgttgccaatcctcctccttttgcttgcagaagattgtccaacaatccgtgccaatccttctctaccctgtacatgggatgccgccacagcatggctcagtgagcagtgtgtaggtccacacctgggatccaaacctgtgaaccctgggccactgaagcagagtgcacaaacccaatcactatgccaccgggctggcccccaatttttatcgaaattattttagcataaaatgttgagttcagttctcaaggatttatggactatctaaactgtgacagtttctgagaatacagataataataaatgcattcccttcttttgaagatttataagtggaaactaacctgaaattaagttagagaatcaggccaagtagcatgaatgaccatatgaggaaacttgggtttaagagggagtactttgcagcaattggggcaaattaattgataaacagcatctctctagccagcaagaccattttggaccaatgtaataatctagggcaatggtaaaaatgatagatccattacttagaagtcaaaattgtcagcaataaatatttactggatacgaggatgagagaaaagttggagtctgatacctacgtttgtgccttaggtgacttgggaaatgatggtgctgggaactacaaaaaaatatagagggaatggagtaacttcatgagaggggattgaggaggagaagatcagcagggagagacaaggagagagagagaacttttttgcgctagttaagtttgagttgttaatgtttcatccaagtttgcatggatggtaaacattctcatgttagaatctgaagttctaggatagacatctagattttagggttgtcagttagtggtcatagttaaaaacttgaaaattgctgagcttgtccagaaagcatgtataaaaagagagagagaaaaaaagagagagcaagaaagaaatttgagaaaatatggatgcatgaggagaaaatgatagtaaattactatccactgcagcagatgaagtctaagactggatcaccgaacttggtaaaaggagattgggaggattattaatgactttagtaaaaggagctttagtggtgtggcaaagggcaggggttatcacagtggtctgagggatcaatgagaaattgggtagtacatatagcaaataaataattacaccagggtgtttagctatagagaccagagctataaggttttaacaagtagggaaactctgaacaaaaggagattttatttgttgcttcctctctctttaagaacaggagaattttgaccacatttacgggcagagaaaaagagctagtaaaaagtagtaagttaaggagctggccccgtgtcgtggttaagtttgcaagctcctggggttcacaggttcagatcccaggtgcagacctagcactgttcattagccatgctgtggcagcatcccacataaaacagaggaagattggcacggatgttagctcagggaaaatcttcctctcacacacacacaaaagtagtaagttaaaaatataggagaaatggaaataattggtgaaaaagaaaccagaagggatcaagaaaaaaacagaaagatgagtgataaacaggaaggctattctctgccctattccaagactgaaagtgcagacatgagtgtgtcaagaagttaccagccctgggaattcttacttgaagaccttcaaactgtaactggtgttattatttaaaaaatttcactcattgcctgcaaagtagatgggaataacttcattgtaataagaatatttactgttttcacttaaaaaatatctcaaatacgactttcattaaacattatttcagttataggcactgtactattgtaactgtccatacttgaaaaccaaggaaactggtttataaactggaagaatcatatcatttataattttgaattagtaatgacaataatgatgaatctgatgctagaagcctaaaatgtcttaggaatgtcacacaattgcatttagtctcaaaactcctcaaaataagacttagtgaagaatgacaaaatcacttttattttatgctagtaaatgcaagaaaatgaaaagcatgtgaactttcatgcccttacagaatttcattaaattacattaagataatatatatatttgtgtttatgtatatatgaatgtatataaacagaaccttgacactacttcacatgtctatatataaagaaatacattgtcttagaaacttagcagtttaccaacatttttataagtatactgatatgcacgaaagtgaagcttatacataagcctatgtttactaaacaacactttctatgaggtgctgcatccgttctctaaccccaccacgagtatctgagtgacttaacatcaccattttacagaggcagtgactggaactcacaaaagttgagttacaagtcaagaccacatagctaaaaagcgtcagagctggaatttgaagcttcttctatttgacttcaaagcccatgctttcttcacctctcatctatttcctgtttgttctttctttcctctcatctatttcccgtttgaccttacagacttagtataaacagcctctttgatatctaatccacaaactataaacccctgcgctcatgtgatttaacaccccaggttgcccattggcaccttggagcgctccagagaccctaggatgagatgacagcatcttctactctcctctcaccacttttacaaactccagagtccactccacccaatgaactgatatatttagactgccctccagtttcttgaccttagactccttcctctgcccaaggagcctttttgccttctccccatggtgaactgctaattctccaaggcctcatcacctcccacatctgacctacaaatctccatgaggtgcatctcttgcctcgcagagctaatggcccccttgccgtgtatccatagcacaaggttcaagcacttatcactcggaaccataataattactttaatctctcccctgctggaatgcgagcctttcaaagacaggcatagtattttattcaatgtagaatcaatagtgtgtaaagcagtgtgtggcacacggtagacaataaataactgtttgctgtgtagggtaaacaacacggactttggaggcgatggcaggagaggcggctgggtctcaaatcccagctctgcctcacaccatctacgtgagcctaggcaagtcactgcctgtgagcttcacatcatcatctgcatggacacaatattatctatcttaaagagttactatgaggattgaaagagaattgacccaaaaaattagagtccttagtaatcaattaagcacttaatacatgttagtttcctgtcctttcacctccaccttcttgaatgcctaaatgcagaataggtgagagtcaacaaggataagtgcatttatggactgaacaaacattattcaaatgtgtaacaagaatgagaaactatagaaggtgctgtgtgtctgtcaaagagacgaatttctgtactcaaaaagttgacaatcttatgaggaaaataaaattttattcaaatgatttttctagtaaggtataaattgagtactataaaccaaatatatggacactgctttggagaatgtaatggagggtgtggctgctttggctggagaaataccggaagtggtcaccaataatctggaatcagaaatgttttgaagtactgattataagttggagtcatggatacacaagaaagggaatcctaggtagaagcttcagtaagagcaaaggcacagagacgacagagcaaaggatttctctgggaacaaagattggtttggtttgacttgctagagcataagaagcatgagaaagtgtagtgggataaagactgcacgctgtggagaaaagaaacctgcacacctatggaaaaatcaaaccctcaattcattatccggcttataattctcatgcttcctaatttaagtccctctaacctacctatcaggactttcaaacaaagttatacctcagagaaaaaggaaatttaaaaactaattggtagtatatactgagcatggaagcaaattctgtttactgatttagttgagaaaggagcaaaatctatttttctaaatgggtgagtttcatttattattgatgttaactataggtgactactcatttccagcttgcaggattgcgagaacaggaaaaaatgagtataatcaaaaagagtcttatgcaaaaactcttcctaagacgtgccagtgtccttctccactgaccagtcctcctttccctctcttctagactcaaaatgttctactgccccctgctgctttaaggttccaaagctaaaaaaaaaaaaaaggaaagaaaaaaatccctttcatcatctttcactgatttaaatgattccaccattttactttttttcttcctctttctccatgatgaccaaggttctagggcttggttctaggccaaatgaaattttgatagcaatgaaagtgtaagaatcacacaaaatttggtaggaggaaattacagctttgaaaatctagcacactgaagcaatcctatgggggcatcacaacttatttaggacttctcagtggtacattttcatcagaaagtagtaaccaatgcccaaacacatcatttgcctctcattcagatggaacccctaactttctaacccaagtatacaatctatgtgtataattacaggtttcccatacacagtattctgtatacgttaaattaaatgttataaaaaggataaacctggcttaccctatgttactgaaatttgttcattaatttcagcttcttaacatgtggtacagaccttacattttttccatgtattgtgatctaattagtttcagtttaataaatattttgttttcctttttggagtgtgtatgtgtgtgtgtgtgtgtgtgtttacaactcctgttactattctgtatgttaggtcacaggaatctacaataaccaaaagcaaaaaatcaaaaagaagaccacctggaaagttctcagtctcacagcgatcaaatggcacatcattatcctaagtatggctttctatcaatactgtattcagcaaacagttttgcgtacctgctatgtacagctatgtgtaaaatgcagcaaaaatacttattcctattttcagcagttcagtccagtgtactagcaacagataccctcttgcatttctgattttagctaaatgaaggtatcataatccaccaacatattcagcccagaaatattaaagatttttaaagcacttttttttttttttcctgaagaagatacacactgagctaacatctgttgccaatcttctttttgcttgaggaagattcaccctgagctaacatctgtgccagtgttcctctattttgtataggggatgcctccacagcatggctgacaaatggtgtaggtccgtgcccaggatctgaacccgtgaacctgggctgctgaagcagagtgcaagaattgaaccactaggccacagggctggtcccttattaaagctatttttggttcccatttgagttatacattgctaccataacaaagcactccaaaacttagtgacttcaaatgacaaccaatcattattcctttaaattctgttgttgagtgagcaatgcttatgcttcatatagatagagaagctgtggggctaggatggctggaagttgcaaaatggcctgacaggggcctgactgggaaaaagatggggctgttggttggggatcttggctttcctccacgtggacctctcttcatcacttcttgggcttccatggcatggcagctgttctaagaaggtgcactctaaccataagcattccaaaaggacagttcccaatacacaagcgtttatcaagcctctgcttgcatctcacttcttaatgttttttaaccaatgccagtcacacggccaaactcagattcaaccaaagggactacacaaggccacgaatactgggaggtgagtttcactggggccaatgtaataacctgccacaattcctctccttccctcgcaaataactacctttgagttgtcttttgaaatgttcctcaaatacatgtatataacccattttcactgccttagttcaatctttagttctctttcatcttattttctttctttcctttccatctttttcttttatttatttttttaataaaaatttaactggacttttaactaaggattggagaaagaacagtaatattcattcgatgaacgaacacgtgtcacgtagtagtaatacagtgtggtaggaactgtctgtgccatgagacgggacaagattcttcctctgccctcatagctaaaactttgcgagggaaaataatacctgcccccagtccctcgaccctgccctcctaactgtaattatttttctagcttacagatttcgacgtgtcacaaccttgcttaaacattttccatattgtcctcggcctagatgagatccaaactctgcagcatctcatttaaggtccctcaaaccagactctccaggttcatctcctagtgcttcccctcaacttctctctcattctcttttgtaggtcttgtggctttattcctgccattccatctagctagaatgctcttacccagtcctcagcttgaggaacatgtaattttctctttagagccacacttaagtactttttgataaggtttccacaaagacagagagaacaaaccacacacatatgcctacgcagactgcgatcatatctctaacttagttttaatgctgttcctctgttctgcatgtttgtcctttcacggactgtggactcattgagggcactgtgttcctggttacacaacttggcattttctactcctaatacagcttggtatgtataagaaaagaaaaagaggaggaggcatctcatatagtttctttcatgtctatgaaatgtactctctttcattcactatcttcaaaataaaaaacaaaaatcacagtcataattatatatgtaatttaagacctcagagcttctccaggatgaaatgtggtctaatgacaaatggaggctaataaagaaattcctgttcagtgaaacaaaaacaaataaatgaaatgtagatataaagagccactacacttcaatttaatccttgtttcgatgtcttataataagcaaatgggcaactttcaagggtgctggtaagataagggtatgctctctaaatccagccactgaaaatctttgaattaaattgtacatttttttgagtagaatcccaccaatgaacctgtattaaaagtaagtcttacagtataaaactaaagtattccatagaacattactttcattctaaattcatcatgaggatatatccattgacgttttcaagtgtacttgaattaatgataaaacatgtctcatatttaaactttaattgtaatatagttataagatttcaataagtgaatagatttttaacatagtcatatagatgatgagagaatgtgaattcacaccaatgcaagctccatatcccgtgtaaccagatacaaacagttgtgcaattcaataagccattgaatttatggtaacagacctcattggatgatgactgtttgctttaaaaacacaccaagaccttctagaatcaggtccaatttaacattcctcttatccccatcccttgctcttctgtcttgctccctctccacattggattgcgcttgtcatttcctctagcggatgttacacccccacctaaacctcccagcacaaacacaatccctttttcatgacccaattcaagtgtcacctcctccacacagccctcatgaacccttcgtctggaagtgaatgctctatccccaacatcatgcagaatttcgatttcagttctcttaaggttggccactgctttgtacaggtgtgtccttccatccctcccataatgactgtgttttatctaacttgaacattccacattgcctggcacatggtgagcactggataaatgtctgatgactgatagaacaaatgactgcacaaaatcaagtttgaatcttgtcttttaatttgaatagtcatttacttaaatcatgaacactcaaaaaaagattgacatttgtactgggtactttaattttagttaagtcttcattcatatactttagaataaaatattacaaattgaaaagacacaaattctaggagatgagaaaaatagattacaacacgagtgaaagcacaattctgaaatgtgtcatatgcttctgcaccctctggcaaaatgatgaaaagaaaaaactaatctgcatttctctcgttctatttttgccacttattagatatgaaatttttctgtaaaatgaggtcaataatatctctttttcttacctcacagaatactaatatgaaaatcctttcctcaagctaaaatgtgaagccttggtattactaagccaaaaagttgatattcggtgtgtttttgcactagaaatgattgagactgatgaacatttagcccaatcactgtctagcatacttagggagaattctcctttgagaaataaaatattcatcatttctaattataaatggtgctgttgtcaagacaacttttctcatgagggataggattattctaaaatagtcttctttaacaagtttttttttaatctcaattcttatttacaaatgaatatacaacactcctactaataactcattactcaaaatactctcatcaatttaaaagaaatgttatttgggacaggtttcaatagagttctatgccttagctctactagggaattagaattcataacatgagaatttaactatgtagcacttcaattaaaagcagggagtctggaagtaatgttacacaagtagcaggcacaatagagttagcatgccccattaatgcctgaccgttggggcaaaatgacattctgaggcatgaagaacaaaagggtaattggatataacagagacctcattttagcaagcatgaatccacttggctgttcctataagcatgattcatggcaacactacaaaaagaagacattcttatattgaaattttcaagtaggcaacaatatgcttatctctttcttaagattataataaagatatatccaaaatagtcaatattctgaattataaaagtgtaagtgttatcattattcattataagtttacaaatataaaatatttgtaatttttaaagctcttccatacctcatttaattctcccaacaaccacgtgaacaaagcagggcagagagcatctaacttcacacatgagaaaagaggtacacacagttactgttcaaggtcccatagccagtaagaattcacccactcattcattcattcatttatccaccttttatgaagttatctactatgtggcaaacactgtactaatatgttgagagaacagaaaattaacaagattaatcttttaattaaaaaatcgtatacagcagatccaattttaaaaaaccttgtaaattcactaagtgcaatagtattttaggctcctaatagtataatactcccatgaagcttagtcattacagagactaagttcaaagaaaaaaaaaaggaaaactttcataagggaaaaatatatgtaaatttcttcttttgctaaaatcaaccaataagctggagatttatttctctttaaatttaaaataagcaatcattaattagttatttagcacataatatacatccatcaccatgttagtcactaaacatataggctataaaggccaaagctttgttgtagttgagaacaaaaatgtatatttgtgtgtgtgtgtcccccccccgcatgtgtctaaatgtgagacaacctgaatacattcatcatatattataatctaggacatacagatatgtagcgagctagcaaattaaaattaaaaaatatataattgcacagaaaattatgaaatatgtattctaaactgtgaaaataaacaatgtccttgcacaatataatcccatgtcctttgtcaagattaatgtaaatatcagactgaaaatttttatactctctgagaatgtcttatgacaaaatataccctacagtaattcaaataagtaaaaccactccactttcttccttgagaatagaacacagaagcaaacaattatggaaattcaataccaccttaaatgattcattgtggtagaccttgaacttagttgaaaatctttcttttaaagaaagcagagtatgtggttttttaaaaaatccatacaatagagtcatgtgattgtaattattttataaatttgatttgtttaaaaagcagaaaagatatctcccccttatattatcctaattaaaatatactttacctaaaggcttttgtgaactttaaaatgtttttatattttctatattgatttttattgtgaaaagactataaaataacccttactttgaataaaattaacgattcaaaaataatgacctttaattcagactttcctaggcatgaccgtaatagattaataaatttagtattacaaactaaaagataattagcacaaaatactgcaccattttgaatgaagagtatctgttatggggccctgttgatgcccaaggcagagaaagcattttgcctttgacaaatgggcaacagcaataatgccaagcaatctcaatagaacatggaattggctccccctattgggcctgaaaagtccagatttttcaccatcacatcagagatcttttaaaaaaaaaaaagcaaaatgaataatgtaaacaaaattaaacacctacaggtgcaatggaaatttatgtttagccatattttctttttctctagataaaaagaaatcaggaaaaccagcacatagttagtggacaaaatgagaaataattttcaatttagtgaaacagataaaatgcccaaatgaaatgtataatctcatgaatgctcctgtcttcttttgtcatctacaaaacatgccatcctttgagtcaaagttgcaagaaaaaaaaacagttactcctacactacaatatggtttgagataatgttctggtaataaaatttgtttttacccttgatatataaatatattagaaagaattttttttaaaagtgcttacattcttatgctcacagaaatgcagaggtttgtatctgtcaagattggctgttatgattcagccactgggtgggttgtcttgaacctacttgccccagaaggtctgagagcaactggtatggcaagagcaggaagtaatacagagcaaaaaaaaaaaaaaggatacactctctacttgctcaggaatataccactgtggggaaaacatattacacaaagtaacatagtcacagaaataaatgtaaaattacaactgtgaataacagcaattttacattattgaaaaataatacattacaattcccatttgcaaacaaagagattattatcaacctccctgtctctgcctcacctcatcgaatgctctgccaccatcactatgagggttactgtaaaaaattacagagttttgacataaatgaggcatttggaagggacaaaaaggaaaaaaaatcacaactaattaagccttaaggccttaaatatccagcaacatatcaagatgtttctgtaataccctaattgtattttctcagacttcataaatatgtttttaactttatcttgtcccttttcttaagacttggtcatttaggaaattgaggttactaagccttatcaacaagtgcagagcaataaaggggtcaaaatgccataacctacagcgaatctgttcaagctggttgctttccttttaaagaaaaggtgagacagccaacttgtgggtcctgccttcactctagtctcacaggagggctctgggctcactgaataagatgtgcaaaaggaagagagaaacaccaaaaatagtttcttctgaaaatacctatgagaccattttcttaccagaaaatggagagaaaatacatcattgagctcttccctgcacacatgcttttaggacccagcgctcaagcaaacactggtgctggatcttagatacatatggattgaataggctgtgtgcacgggcctgggaactgaaccaatatttacaacattgtttctatgggaaaacacgttccaagttctaaataacttacaaagttttggagtatacgaaaacaaaaattttttgttatgagatatattatgaagacaggatatggattacagttgactcggagtcaattcgtgtggacctccttttcttaacctcacacttttccttcacagtctggcaaaagaatgaaaatgccatgatttacacaggtatataatttttgtttgtaaaaaccctatggaatttttaaaattagcaacaagaatacataataaatctccagcaaacttaatctaattccaccagtcaccctaccctatttcagttagcctactgacatttattacattgacaattttgcctggggaatctcaaaaatgcaattttccaaattctgctggttagcaaacacagattttactgtacttggttactcttttatctggaatgaatcgtcatctgctggcaaatagttcatttaaaatatccaagttcttagcattccagttgaagagggaaaaaaaaaaacattaagaacattttgcctctcaactctaaggcaatcagaacattttagaaatataaaatggttacaaacaagaatttcttccaaactttaaaaatcagtaaaacataaagttttatttcagataaattctttaatttttaatttattactaaaaatatgaaccatttttaaaagaatcataatttacgacagcactcatctatttttactatttcaaatattttattaaagcaggctgtaataaaaaaatttttaaaaagaaatgaggactaagaagtgcagtaagaaatgcatatgaattttaaaaattgcttataaggaagtgagaaaagaaagcctggtccaagagagaaaaaaaaaatggcactctgaaaatcaagaaatattaacagtaaaccactttcaacgacaattacaagagcttctgattgcacacaacataatgctgtgtgaaaaagccaagatgccaccttggcattagcagagaagaaagggcaagttcacactgacgctggtaagtcataatcagaaaattccaagttagaaatgctacccctttcattcacttctagatagtttcaatctatttgatgaaatctgctctttgctttccttttcagagtttaatttcagttaaacatcttaaaggaaagttgtcatttgttcatttcacagatatcccaccacacagtaagggtggtgtggcagctcaaaaaaagtggggcatttagccggctatcgcacaatgttgtttacatccatgaagccaagcatttaataaaaattggatggtggtaacttcctgaggcttacatagtatctatagtctagcatcacagaatggcatataagggcacagaggggttgtttacccatcaatcacttgtcagtttcacgggttctctacaaataccccccttgtactcggaaactcctttaccaatcgctgtaattacaaattttaaacacagcaatagacactttttctaaaactactaaattaaatcaccagcagacacaaaaggaaaggtaatgccatggtaacttttgtgcaactgaaaaattacattttttaacttattcccagttcaggtcattggtttattttttgttttatgctctttgtttatagcaacattctactctccacatctttttaaacatttgacattataagtaggcggagtaataaaataagcaataaattaactcatatctctgtgttcagagcaagagactataaactgttttactagtttatcctcataagcataacaagaggtaattaatggacacttgtttggtttgctagtatttctaaaatatctacagtatgtaaaagtcaatggacaagaatcaataggaaacttgttccaacatactactgtttcccagatattttcttggattgaacagatttcatgtatgacatggaccatcatacaaataaaatgaaaatgttgtctcctctagagcatcatgtcaaaaaacatgataatctgggcaactctgctaacactttatttagtaatatctattcttccttattgtctgttcttactttgatttaaaagtgatctcttaagaaaaatcaagcctgcaaatttaagtacatttccttataattatgcctgctcaaatgagcactgatttaagattttgaaaagaaaaagatcattgtgcacggagatatttgaagatacctcaagatcctgagaatgatatggttttattttgttctatttcattttattgggttaaatagcttctcaggcagctcaaataactttcaaggggggtagggtgaggatttaactggcaataaataaattgggttggatggactggctactaagatagccaatatgacttctgtctaagtacaaaactgagcgaggatttcccccaaaagtcatggacaaataaagagtcaatggtaaaaactgaccttgctctaaattaaattaatatctttccattggagggaaatcaaaaattacttaccccagagtttttcaaattaagattattgcataagcagtgtttcagagaggggcttcagagagcttttcagagtaggggccccctgatcatccttgcttcagagaaatcctggttaatctatattatataatgtcattttgtatcagattcacttttaaatggaatccagtggcataaaaattaaaattagaagcatttaagacatgcttctttttcaatcttccgacagcggagtggtgccgaatatctggtgccagagcctctgcatgggccttttgaggcaagcagtcgcttcaacaccaaagacctttggtctttttgagctatctagcatttggtttggttcttctttgagagaataacacttcagatgtttttaaaattttgattaagtagcacctagataactatctctttcttctaaacatctcaagtttcttcaactgattcccagatggtataccattcaggccttctaataccctcagtgtttttctctgaatgtctttcagttagtcaatgtcaatattataatgtcacttctcaatatgtgatggcctattttatggacctgagaagacacgaattctaatcatggctttaccttttattagctaagctagtcaattttcagctttctcatctgtaaactaaggaaaataattgttccttcttgagagaattttacatgaataaattaaaaatccacatatagctttcaaaagtgtcagataaacaacctgtgaatttcctttctctcttccttaggtcaaactattagccagaattaaatcaaaacaaaacaaaaaccactctaagtgagaatggagaattcagggtagaaaactgatacttaaacatttgctctagtggcctcaggatataaacctcaaatgtatgaaacatgagacagcggaggctaaggcctttgtatatttacctggctttatcccaagcctagtacagcacccttaacgtgggtactttgtgaagacaaaaagataataataataagcatgatgtacagttctgtgaatttcagggaggtgcccttaaataacaacaaacgcacacagtacgaaatcgtaagaaaaaggatctgggtccctggagcaggtatagaccaggcagcacagtctcaggaggacatttacacggaaagccctcctccaggggctgggcaaccttgggcaggtcacataacatctctggaacctgtttcttcacctaagtttctaaggttctttccagcatggcaagtacatcccccttttattctaaaatgaaaaatgaaggccacattaatatatctatgcctctagttcttcaaacaacagaataagagaaacatcatgcaagtgtcaggaaaaaagctaagaagtggttccaaaccctgaaacgacaggagagcttttcctttcatgattctatttcacactattatagattaacaaattcacttcttaatcatcagtacctccattaatcaaaatgcttagggagtcgactttttttgttatttatataggctttgtttaaaattttaaaatcttgttctttaccaaaaccaccattgtatacaacagctatgcaatttcattacaaatatctctttacatgtccttctcttttcctaatagtatcaccctgaattaggactttggaccatgacattatttttgtgactgacatctaggcttcaagtctctctttactttaatttgcagtcataatcttcccacagcattatcttgatcagatgaccactgtctaccaaataaagcctgaatgatgtccttagcctagcatttcagagtctttaaaatggtcccaatttacatttctagactatctctcctgaatccaataccataactgtatgaaatttttcttggtcaataaacataccttttaaccatttcaactaatgtcattctctccatgtggatgctttttctctctcatgcttatggaaactacctaaatccacatggaatagaatctctgtattgccttcctagatactccaatcggaaatagtttttcaggggcccgcctggtggtgctgcagttaagtttgcacgttttgcttctcagcggcccagggttcgccggttcggatcccgggtgcggacatggcaccacttggcaacagccatgctgtggtaggcatctcacgtataaagtagaggaagatgggcatggatgttagctcagggccaggctttctcagcaaaaagaggaggattggcagtagttagctcagggctaatcttcctcaaaaaaaaaaaaaaaaaagaaagaaatgctttttctcctctatagccctgtagtacccatacgactcaacatcattcagagcactgatggaagctccatcattgcatcattaatctatcatgtgatgtggctgctcaaagtaaacaacaaaaggctaggagtttatttccccagaaaacagattaatccgttagccactcatcgaaccaaatagtcacactttaactagttcaacagagagaagaatcaaactttcatttcaaagtgaccaccacatcgacctcatacaaacagctgcaattttattactgctaataaacatgaaaaaggattctgcagttagcatgttcaaaactcagaaattctataaacactgtctacttggtactatgccagccacttggtactactcttatttatttcttataaaaaatctgtgaattagttactattattttcatcttacagagaaagaaactgaagttcagagtggttaattattttgcccaaatcacacacttagaaagtggctgggccatgattccaattaagatattctgactccaagcatatctgtctgttttgtgattagaaacctaccattcatttataggtatcatatcccagaggcagagaagaaatgaagtagttgccttacatctaaagatttagagtctgccagtgaatggggaaaagaagactcatcagacactacgcatctgaaaggagaaatgcctaatgaatcttgaaattattgtgtcagccttcccaaaaaggaaggtgttgggacggatgtgaagaaagcctgaacacaaacctcagccacagtccatccagtctcttcttcagcacatgcacaggaacaactgacatacacaggattcacacacgcacacatgtacacacagcagggcaccagatgtccaggacgtcattacgctaagctcactcacccttttcttaaggcatctgaaaatgacatcaagaaaaagctgcaaaccaacttggaaactacctatcagtaaactgtaagttaaatcaaagctatccataactgttttgttcatgtataaacatcaggacaatttttggagcatatgtccccaccacttataacttattcatgtatttataagttagtgttactgcaccagtatactatgcatatttaaaaaatagacaaaaatatagttttcaaacttgagagaaaattttacatagaaaattctaaaattttgtatatataatgtaaaatgtttataatataaaatgttcataattatattatatactaacataatataaaatgtttataacataaaatgtaaactgttatgttaaaagaaaaggcctttatgagttttttcttgggagtattaacttagatgtggcaaaaaggcacccatgtagattcataatataaaaatttggaaatggaaaattggagtatagatgagataaagatgaaatgaagaaattctgaccaagaaaatacaacaacagcaactacacaaagcaagcctgtattatgtgcgtggcactggccttccacagaatttctttttaatcacctcacaaacctgaatggcaggttttattatccctacatgtaaaaacgaagcacaaagaaatcaacattctaagttcagttttatacacatacaccaaaacttgccataatagcaacgtttccaaatttctatgataaagtcaaacgaaaaattaaaacttaagttcttaactgtagtggacactgtcagttacctcctcacatcatctgtgcccctccctccttcctaatagaatcctgatctgatccacttgcccatccatccaaaagtccagagagatagttgaactagtttaaatcaacccctatatggtatttctttggcaactcttggtctcaagttatgtacttcacctaagttggttcaatcgattgaaggaagggatttagaatccattttgggggcagatatctcttcctctctctctttccctctttttcttccttttctctctccgttctttcttctcctccctcccactgaatatgaaccaggaagcacgaagccctggttagcactgatggccattttgagaagaggagcaaagccttaggacaagctaacgctgaggatggagaaatgaagagacagaaagaaattaaaagctacggtttgaaacactgctgaatttcttcctcggtgagataacaattttccttattattgaagccagattcagacaggtgtcagttatttgtaatcaaaagcatataactaatctattaaccaagccacctatcttctatactcaaatggtttatgtcttattggtaaattaaagaaaacaagaccttaaaattgaagagctttttccataggcatccacaataagttggctgacatgaaatattatcctgggtatggacgtcatcatcctggcatttaagaaattaaagtgaaatgttctaattttcaagtacacaagcacagcatacaaattcagtacagtgtcagtatttctattaacataatagtgaatatttattgagaatttaagtataagtacattactgacatcacaaactgattcaatcttcacaacaactcaaaaagacatgtagtatattatattcacttaacaggtaaggaaaccaggccaggggagtgctcccgcccagcactctgctgaaactagagtttgaactccatcctgtctgcccactaaaacttagctctcttcaccatagcctgctgactcacatgccatttctttttaaattctaaaataaattaacataatacgttcccataataaacatgatggaatacaacagctgcaaggattgtttacctggacgtcgcattgacttatcaatctgcacacataaacatgctctcatttcttcaaatatgaactgtttaaaactcagacacattgttactgaagtttcttgtattttttttcagatggatgttctctgtttcaatgatagaaatttgacttggaggaaaagaatgaacagtccttattaaatctatttaacaagcatttatcaggctctcctacgcacttagtgctatggtcagtgctttgggaagcataaaaatgaaaaagacagaacttgccaccagaagcttgaattctagatggagagagagagggacaaactccctatgacataagacagctgttacataaaactaacagaggcaaaagaaagactgtgaggcacggctgcaaagggagcaggctctgagtaagctctccaaaaagagcctcacagaaaaaggacacatttgagatcattatgtaaagtcttaaagtaagctcatctagtcaacagagtaggcccaactatgggccaagaccaaagcgatagtcaaataaataaaatatgacgcctgctacagcattctcttgagatatgagacataatgttagccacaaagcagatggcaggtattctcccaggcagtaaaagagaaggaagagggatgacctgtgctaggctagtgtgtgagacctccaaatggagagcactgtttgcctgaggcactgagtaaatgtggtcacattttcctagctgaaatcaagtaggccgtcatggtggaggaagcacaatctgggtcttgggtggtgaatagaagtttgcctggtaaagaaggtagagggaatatcagaagcaaaagtccagaggctcaagagtagctaacttccctgtgtaactctgcaagtacatggtataacaagaaaacaagaataacttggggccactgatggaattcaaagcccaagataggagtttagattatagacactgagtgtgttagtacaggtctagaggaaaataatcattctaatcatttactagccttatgacaatgggctggtaattcagttaaccactttaggctacagtatttcatttatctaactgagacagtgacatgtatttatcagagttcccttgaatataatgtacaggataatgtgttgtgaaatttaaacctctacactaatatacaaactgattttggactagggaaaggacataatcctagctgtactttaagaagatacctctggccattgggcagatgatggccattggagcagagaagcatcgggaaagaataagctaaagaaagggaaaggagaagatggacagtcgtggtcctcaggaagcagaatcaacagaacttgacagtggggataagagagaggaaataaggcaaagtgacactaagcttcaagtttggataagtgatggaacagggtggaggagagaaggtgtcaagctccctataagcaccaatgcccagttaacaatgcataaaactaggcgaggagttaaaatagattgtaagaatcatgcattttatagtatttttacctaattaaaagaaacttttgtcccgtgtccagttaatatacgaggtaaggagtactatactgtactcaaatgccagcctgacatttgggcaaattatatcacctctttgggtctcagtttcctcacccgtaatttggttctccttcatattactgaggatcaaatgagtaacaattcctgtgaataaaaccccttgggagagctcctgggtcgcacactcaatctgagagcttatagctgacttgacactttcagccatgtcatcaccaccttctgcactcagaaaacatttctcctcgtgaatgaaggctgtattagataaaagcaccaaagtttctacataattgtttaacagcctgccttcaggaatacacacgaaatataagtgtgcttatcccatttaagaaaaaggtgctttgatttggggcaaaaacataaaaatgggtagtatgtctcctgagtagtttctacaagctacaaggaaatcaagaaaacaggcagagcacactccctggatgcaaacttcagcctgtctgctaaatggtctattaggccaggatcagcacagggttgctaacctttgctgctgatggactcaccaccactccacgctgtaggcctcatcattgactcactctcactatcatgccctccatgatccaattccctattccctagcctcccagctgagctgtcatgactcactgtctctctagggctggccttgctaagataagataatggccttttatgtgcaggcactgtgaattcttctccaccccttgcacagggaagacaatttaagtggaaaggaataaattgctggatttaatacagtgaccaaacacaaaagcctaataaaaatgtcagaagtgtacactctagcatggcaaagaattgtggacgcatgctaaatgatgtacgctgtgccttagcaaccccagtaaggatacaaaatgatgagatgaaaccagctgccacagtggcttcctatcattttagcaatttctattttgtagtaattttgtagcaatattgttttttttgaaaattaaacaaagtcatagacacacagaaatgtgtaaaaatatttggaaagaattgataaatactataagatattgcagaatacccttttcttcgggctttcataaacagaacagacacacaataccacagtgaggaagttggtacaaaaagccacccatgtataagagcctatgttgatataatatataagatatattgattgaacaggtttattgattgctattctctttaaccttaaacactatcaaggaagagcaagcacaaagatattaaaaagacaaagcttcacatgctttctgcagctcatttgtcatgaaagatgactgtggatcctctgtatcacctgccttttccttcagtctatgaatatttgaatgtccactatatgtgtatactgctctctggtgaataaagacggatctgtcaaagccctcaagaagtgtacaacccagggagggattgggagggattctgttagcaaactaataatcacaatataaaaatcaaacaatttttataatacaccagacttagtcaaagtagcatacttttaattccctaggcttgcagtgtgcggattaatcacattaaaaagtaagtgaagacatctacatattggaaggtgtctattgtttggtattgcacagcaacacaagggacaagagccccactccccaggcagggtgggggccccctctgaatggcaacagtccccatttagaggaagcaaagcagtgcctgcttagtagcaaagtcgggtgggatttcagcattccagacacaggaatgggaagatagcgaactccatgcaaatggagaactcatgaaacatgtagaaagacacgagagaacaagcagcttgtaacgtgtctctgcacagttaggcttcccattcttatactgggggaggggggtactcagccaaaacccagaaaataataacaaattattttaacagatgatggtaaacattgggttattttcgccccagcaatttgagagttgtttgatttataatatttaacatcaattgaactctgtgaccgatgcattacatcatctaatcctcccaatggctctaatgttgatgctttaattatctccatcttaaagaagatattgagccagaaaggttaattaacatgctccaagtcacacagctaggaagactcaaagctaggattcaaattctggtcgcctgtagcaacgtctaaattaattcactacaccaatatttcctgtgcacctaccactgttctctgccttcatgaaactttcattttaattgagagggacagacaaccagataaataagcaaaatacacagtatgatggtgatggagcctaaagagaaaacgaaaccagggaagtgggaagagagggttggggtactcagcttccacatgcagagggaacctaaactattacaaaatggactacttttatgcttttaataaaatcaaaaaagttcgcaaatactggacataatttgaagtgaattatttctattgaatccatttaatatcaggctttaaagtagttttattttaatgcaggcaaggttatagagaaaagggaatgcttgtgtactactgatgggaaggtaaactggtgcagccactatgtaaaacagtacagaggcttctaaaaaaattaaaaatagaactactatatgatccagcaatcccacttctgggaatatatctgaaggaaatgaaaacactatgttgaagatgtatttgcacccctatgttcattgcagcattatttacaatagccaagacatggaaacaatctaatgtccatagatgcacgaacagataaagaagttgtggtatatttatacaacagaatattattcagccacagaaaatgaggaaatcctgccatttgtgacaacaaggatggaccttgagggcataatgctaagtgaactaagtcagacaaagtaaggcaaatactgtatgtatgatctcatttctacatggaatctaaaaaaaaacccaaactcatagaaaaagaaatcagacttgcagttaccagaggtagagggtggggggaggggaaaatggaggaaggttgtcaaaaggtacaaagttccagttataaactaagtaagtactagggatgtaatgtacaacatgataactatagttactactgaggtatgatatatatgaaagttgttaaaagagtaaatactaagagttctcaacacaaggaaaatttcttttctttttcttttattttgtatctgtttgagattatcgatgttaactaaacttactgtggtaatcatttcatgatatacataagccaaatcactgtgctgtacaccttaatcttagtgctgaatgccaattatattttaatgaaactggggggaaaaaagtagttttgttttagccataatctgttatcttacctgacatcttttcccctaatatttaatataaataagaattggcagtcaaagcaacatgctggggcaactaagagaaaggacggtaattttcagcaatgatcagtataagtattctggtgagaaacaccagctgtatgaaaaaagttgttaggagatttataatactatctttccttttttttattcctgtctctaatttctcatatttaagttattttgtcatctagtcctggagagatgggtttcggtcaaaaatactgaacaaattaaactttatattgatttcaaagctcatcaatcacctacaaattgtacataaaacacttttggcttcagcaccctctctgtggagtgagaaagattcctgcaagtttaaacccagcctacaggatacacacctccttgtgttgctaatgactgctgtgcacagcaggtactccacaagattccaggcggtatagtgacaaaagcagagaagggaaagagttaagtgacaaaattgtttgccagcgttaaaagaatagtcgaatggtgctgggtgtttgtgtatgtgtgcgtgtacatttaacaagtgattttacatacaacacacacacacaaatatagaagcaaatactagtgtgaagttactgaaattctttacaaaaggatctaaatttctctatccacagaggtaacaaaagaacaccaagttcacttgcaaaggtgggctgaaaagaacagatttatcaagccaatgcactataaaaagttaattatctgaccacattggtacaagaaaaataaaattaaacctcaattgcccacatctaaaatacttttaatttttaaaaaatctcaacaagaattaacgaaaagtaattattctttggaacagctaaaggctgcccttgcttatttggattaactggtgtaagtgggagaagcagagaaagcaggggtcttgcgtagtcaaacaactttgggaaacacatttacaaaagttaaacagatttctttatcagacaaccccttggagattaatagacagtgtacactgtagtcactccaggggatatgactttcattatttctcgacacatttgaccacataatacttttctcttggatcattggagagtaccctttagaaatcactgctttgaaatataatacatataaaataatcagtatagcaataaatacaaagcattaaaataacagatgcttgagaactgcagaaaagagctatacttaaaaaaaatctaagcctgagtcatcttacaaaaatataaaaaaattaagtaccttgtaatagatatcacactgatgatgggggcataacatgtatttgcaaataactaaacttctatcaaaacatgtttatctacactttaatagcgttcttcaaccaggtcacttaaacttagaaaacaaagcaatatctggactctaaggctgttgttttaaaccacgcttctctctttaaattagtgtatgacttctgaatagaaagggattgaagaatgacatttgtccattttaaaaacattttgttatatttatagttcttttttgcccctctgtcatatttagttcaagttcttcatttgattttgatctagtattccatcttagggcaacagagtgatatgtaataactcaaaaaaataacctaatgttgatagtagtgatactgttcattgtgtaagttcattgtatgattgacaagaattaaaaaaaaaattctttccagacccccttaggtgaaaactcttgccatgaaatatgatggctgataaacttggtgatttttaatgtaattattgtagctacaagtgttcttcttattcgcacaacttcgttttttcaaacacactatttgctgcagtaatttcccgcatcaactaaattccaggggattacatggtgggtggggagaggaaaaaaggtatttccttttatcaaatgtaactatgttgccttctcattccatcacgttcctccgtaataaaagaagaatccagggtggtcacttggaatacctgattaacaactttccttgaaactattcattaggtgtggaattcgttccccttaaagacgggtaaagaaaaccacaccaattcagagaacaagttcccttttagaaacagactccagatttcagttgccttcagggtattcaggttctatacattctgttctcctcagaagatcaggaaaattaactgaccagggtgcacaacacatttactagggagaattacaggaaatgatggtccctgttctcaaacctcttacaatcaaaagataaaaacacaaatatgaacataaaaacctgcatcaagcaactccattattctctcttgatttgccttgtttggtttttaactcatttcttcatgctacgattagtgatgtctgagaggcaggtgattactgaaatgatttcaagtgtacaccacttacctcatattgaggaattatcaagtatcaggacaaccacttaataatgcataatcatcaaatctcttttaatcatttttttttaacctaagccttcaaacaattcccatttgatagcaaagtcatgcaaaatgtaagcagactacatccagtaaagaaactgcctttactttttaaattgctaataggagagagaacaatctcaaaatcactcatccacagtctaattatctaattcttggtttattaccatgaataattctaccattataattctagaatgtcctatgaagagttccctataaatttttgaaaaagagctagaataaatctttgatatatttcaatctcctccccttccctcaattatgatcagtatcctctagagaccaggaggccttgtggtaaattctgatgatatgatgatgaacacatcagaagtaatccctctcttatctgagctactatatatttttataagcaaaaaaattggtgctcagaaagagatcaagtacctttgttcagcatctgcaggtagtgaccagcagtgctgggtacataattagtgcatcttttgacttctgatctagtggttttttcgtgccacatgtctttcatcccaaattcaaaccactgttagtgtcgttttttcaggtttaatttgcattaagcactcagtcgaaaagtattgattaaccaacctgcactaggctagatgctatatgtaaaacaaagacaaatgtaagacaggagtctttgcaaagttaacacacatattaagattagagaataatacctgacagaacattatatgagacagaaattataatagttgttttaataataaaaacaaaataaaatacatagcacttactgtttgccaggcatcattctaagccttgtttatttagcgaatcatttactccgcatagcacttccatcagaattctattaccatccttgttttacataaggggggactgaggcacggggcaggtcattgagagacattcccaaggttacacattaagtgattcaaacccaggcagtctgagtcaacagtctgtattcataagcaccacattacaatgaatgatcatttggagagttgagaaaggtttgatagaagaggtgagacttctctgaggagaggaaactatgctactataaattgcaggcaagaaaggagtccagaaatgtgctgggagtttccaggcagtaacgggaatacagcataatatgccgtgatggcagtgataaagaggtaatgtagaactagatgatagcaagtcttgaaaatcaagcaaaagagttttatgcaaaggggaattaattttaactaaccaatcactgcagagtagagcaagtgcatttctagatatcttatctcccaatctcactatatacaatgatttcaatagaaaaactatcaaatacattcacgacagcatatttgtttgtattcagaactgttactcctattttttaagaggcaaacttggagattttatctaaaataaatcctggaatctttctttctggtttctatttagagattccaaataactaatgtataaaattttgacatcaactttctcaatataagagcatatcactagcttttttgatataaaagcaatacatttatctatgttaagtgaaatttctctaaatatgtattcttcaggcattttgaacattcacataatttttatatttctctagctctcagtatccccactcacctcccaaacacacacacacacacacacacacacacacacacacacatacacaccccaactggccggcttggaacatcagttgatataaggaactataccatttagaacagactggctgtccagcatgttaagtcaccaggttttgtttttcctctctttctctctttctctttcataactttttaacttctcagccattctgtgtcctgcaactacctcaatcaaaaggtgggtccttatgtaaaggaaataaaatttaaggcaatattcctttttgtaggtttttgctactagcctctgggtggagaagcagctttgggaagaaaaagatcaacatggtcttaaaaaaacccaaaaaaactgaggaaagttttggagaaaagctgaaacttgatagaagctgggagagcatataacattgtacaaagtgcctgaataatgctcagtagtatcttgtgaataagaatataattcttggttcaaagcagggctttctattaagagattttaataacattcaatcctcctcgcactcttttaccatgaataatacagaaagcaggttttatcctgagtcatttgaatttaaacttaaaaaaaggacaaacatttttagtttcagtatgaataaaaatagcgcacttagaaaaactacactataacagcatgttcatttctgaaaagattgagattttactttaacagcaagtaaattagtaactactttttaaaattttatatattcaatatgaagttgcatatccagataaaatgagagaaataacaaatatatactttggtaatatttttgagaaaaataaagtgttactctgtgtgcagctgcccttgacagtacatattctattctccaaatgttacaatttgcctcaaaaccattccttttttaggtaactgtttttataaaagatcaagaataaattcaggcatttaataagatctaatcttctaggaattaacgaagtaaatctgaattttaatattaatggcagcatccttccttttgtctatatgtaaatctctttcatcatatcatatgatagttttatcataactatctccaattaaataatgatgatgataatataataataatgtaacttttttcctcatagaatttgcttgcttatggttatttattttgaccatgattcttaaaacaatgtaactacagtgggttgtttaaaagatatgaaatatgtataattagtatcctaaatgtattaaacttcttgagataaactaattggcaatttcaaatactttacactaggaagttgagaatataaattaaataatatttaaatgttaaatgtttacacaaaaataaactgtttaaaacacattttttaatatatttgtctagaaactttctaaattagcacaccacatttaaaatgtaattaaaattaatattttaggacaaaaagggtcaagattaaactatttgtcttccttaaaaagtttataatgtcttttgtgtttctacttacaaaaaagaaatctcaatgaaacctggatattaaaacctcccaggaaaccaacaataaaagctgctaagaatttcacaagttttttttttccttaggtgttaattaaatgatcatttaacactgaaatgtaaacacaacattttcatctcctgacagcacagcctattataaatccggggtaataaaagtcttggtgttaacgctctgaaccaagttcccacaacactctaagatgccttgtcgtgtctaaggttaagcatctagacacaaaacaaagcttgcgcctactcgacttccagtccaattttcccatcgcccagtgacctaggtaacacttggagcaataaagaataaatttaatttctccagcattttgtgaggattaggaacaattgttggcttgcaatgactttttatccttgaattctttttcctccagagcattcctctagtcctaaaagagaattctgatggtttaagacatagaacaaacagaactttaaattaggcttttttcaatcaattggaactgttggaggggaagcaatcaacctttctctgtgctgttctcagctattcacatacttcaagctttaatctttcactagtagaagaaacctatcatgacggggcaaagctatcttttcccattctgtttccagacttatttatttctcttttctttaagtttttttttaaaacacttaaatcaagttgccatacttagctgtacacattcatttgggggacatttcaagaggcacagatgttctcttaataacatttcacacagccatgtcgtaccctcctcgaccacgggtgttgccaccgacaggacttttcattttcactgcttccttctgtagaatttagttttttttaaactcttgcccaaagtttcttataccacaatttatcaaatattctaaggttaaccctctataaagatttcaatgatgtcaattaacttggctctaggtaacaggtaatgaaggagacgaatacccccatttatctgactgcgaagcttctgtacttttgagatgtactggagatgtgataaaaggaaaataaaacaaaaataactttgggctcaaacctatttcattattaaatattgtttaaatgcaaagtgctaaacagtttgcaatttgcactgcattttgacacaaagtttagtctaaaaatgtacttaaaatcacatatgcagtttgtgtaaagaagatagaatgtactacagatcaaatcatatttgtatattacaagatcaatggagtaatgatcctatattgctttaaaaatcaaaattttagtcagtaataaaaatattctgtagcaatatccacaaatctctgaataactttcagaataatttacctacagttgaaggtgtttactcagcattttctaattcatatttttccttggttatgttatttaggaaaacaatcattaaaacaacaacctaaacatgtggactaacataaacagttgctgagtcacagtctccgtttttatccctaattcattttatacaggaattttaaaactatacagatgaccaagtgagagagagtaaaagatttcattaagaacattctggctttaatgcaccttctttggccaagtaaggataaataaaatggtgcgaatgcacattttatgttaatttgtagtcgtaaaaaaattaatgtggctatgcttatgtatgtggtattactgtaagaataaatgcagaagtgaagtgaaatagaaccagcagatttgctgactgtgagcaagtcgcaagaatatccttgcgactattcttttcatcttatttttcaatgagagggtgataatactacaaatataatttgtcagacttgaaagttgatgatgttcttttgcatacagagcctaaattacgacttgaaattacccaggaagtaaacattatgatcattcccattttacagatagggaacttgactcccggagacgtcaactgatttccaaacatagcagagccactaatatctaagtaggcatttaaacaccagtattttatgccacctttcttaggatacaagttaattgattgtattatcttaaaacattatgtaattaaattaaaattagttgaatagaactaaaaccctatggacacattaattaatatttatttaaatattagaattaatatctatgtaaacttcagtcaccaaattataatcttgagattgcagtggtaactttatgacttacagtctaattttgaaatattccctggtgatgtgtattcagtgatatctttttgacatgaaacccatatacttaaattcatgtttcagaaaacacaatcattctcgatgaagcccctaggctttaatttacatattacagattagatgttggcaatggctgaggcccacaaataccacatgtgatgtgggggtcacatattatgccagtttttctccccagcatctatcccagtattctccaaatccaagctggcataccatgagtacttgctggtgaagacagaaacattgccacttgggaaagcacccatttaaacaagtacacttgagtgagaaagaccttgtacttgactgctgtgccaggagctatactgtggatttcactcagagagtctactctgtgggatggcaacagcagaaatctgcctacttcctactttctccagcaatgtcttctacctagagatccctttgaagtaacaactatcaacacaaggcctaccaaaaatcttaaatacgatcttaatcttctttggttgtataacttctaaattacaggattatacattgattgaaaaagaaaatcaaaaggaggtcctgttcattgcccttttttttcatggcaagtggtaatggctactctgaaatatgttcagatacccacatatcaagtcttttatctatctacttaaaaacaaacctttagttatgtaacagcgatctctttaaattaaatactccatgtatatctctattttttaagtggtaagaacagagtcccttgggcccaataataatacataattaataagttatttaataaataacaaaggacttggtgttttaatcactgagagttaacacttttctaagttttctctctcttactcattctctattttcaaagataaagagtcaatctgttcccctttagcaaaatatcagtattaacaatacaaacagtgcatcattgcaccaatggtaacacacacagaaccttctgaagaactttcatcctatgcacaggaagctcttcggcagccagtctcagaaatagagatcagcggtagctatcatggcagctcactaaatgagtaatgatgtcgatccggctggacaacggtaaccgtagcaactgtaacctgcaattcctgcacaaccaccgtcggatttattgtggcaggggccaaacaggccaagaataaaatgaagcaggagactatggcacctgacacctccaggagcccacactttaatcagagctggcagaaattaattcaagaggaattttgacacaggctccactgtcgtattctgcttttatccttgaatacaagaatcctatgagactaaactgacatgagggaactgaggggttagtattataaaagtacaatattatattaagttaaggtatatttagtttacatgacaaatggatcattttgattttgtctatcaaaacccttcgatgtttagaaaacctaaggagactaaacatttaattagccaagttatctcttaaatttaatttgttctccattattcataatgccttcccagtgttactatttgttcattcaagttacaaaccctgaacccgagagagatttaattcaatacatcaaacacttactgagagctttctaaaggtcaagccttataactagaccctgggaatttttttaaaaatgtttttgcaatacatttatactagaatttatatgcataatcacagaaaaagaaaactaggatgataataattgacaagaagactagtggttgtatctgggtgggagataatgaataatatctacttcctcttttctgtttttctgaattgtctaaacctttctaatatgagcatgtgttaattttataactattaacaaaccaaaacaaaaactaaggctccttctatgggagtaggcaaaagggaaataaagacagctgaaatgcatatttgttatgctacacaaattaatttttaccttaataaaacaaaaaattaaattttctcctaaaaaagtcccaattattattatcaaaaacaattttgagaatctgagatcctatctgacaattgtgacctgaccaatcacactaagcagtcaaaatctactagtctcaggtaactagtcactaggccacataaaaagagcacttagctttaaaaatactatataggggccggccccgtggccgagaggttaaattcacgcactatgcttcggtggcccaggggtttcccagttcgaatcctgggcacggacatggcactgctcatcaggccacgctgaggtggcgtccacatgccacaagttaaaggacccacaactaaaatacacaactatgtacagggggatttggggagaaaaagcaaaaggaaaataaaaattaaaaaaaaaaagattggcaacagttgttagctcaggtgccaatctttaagaaaaaaaaaacactatttataatgttagataattgagtggcagcaaagctcactggggaataataaatgctgcttgcttgtgaacctaaataagaagtttttattcaaagaagtaaagaaaatgaatcactgggacctatatatttatttttgattgttagttttgatttgttttagaagatacaagtgaaaaatgagtttctgcagcaggctttggatacttaagcttatgttagaagtctgggtaaatacagtaatactcaaagaaataaactgaaaaccacaaaacaaatatttataaccaaacgcccaaccgcagtactaccaatgaaattcatctctaatgagcctggattagtagttgcaaactcaagtcgaaaagtgtgaatcattcactgataagtcatctttaaggttacatttatcaggaagatctgtatatgctacccacaaagataactgctatgcataaatttcaatcaaccataattgaccatttcaaaagtcactgaaatctccgtcagttaaccagctccagactgctctgaaaataattttcttccactcttaaactgataataaaaatgcaatcttggttttggaggaggagcaaaggagaggatgaagtatccacataagttaagaaaattatgtaccgtctcttttaaccctcaacctatgcccctttccttttctttcctttccttctacttacactttccatctgtcaacaagtgcttgtaattttattacactgtcctgtagtttacgcagagttggtattattttacagagttctgttaatggactggataaatggtaatgctatttaaactagtctcctgctccaacaaacacagctgcaactgtactactatttctgagcaaacatcttgacctgaacatgtagtgctctctcaacccatccaaagagaaattggagcagacagcaaaggaaaagcatatttggccgccagcagcaaccaaccgtgtcgaatcataattcatatacagtgtaccctctttttctttatattacatttagagtccaaaaaaaaagcatgtgtgcttcttcacctggcatcaaattttcagccaagagtcaaatggtgattattcattacaaaagtgcaaagaaaatctgcataacgtctagtacatcagactagctttaatccaagccaacagtgataaaaatcaaacatcagtgtatgaaatatatgccaaactagtaaactttttcattggttatgcatcaggaaaaaatagtattaaaaaagggtaaaagatgcaataagccaggaaaagaaatagagatactaattagcattatgcaacaatttataaagagaaaagaaattctaaatttgtttctttcgtgaattctagatgtgtatggctgtgctacattatacagtagggcaaccatggatcacttagtgtataagcgacaaccagtcaaattctttccctatcccaatatattttccttgttatttgtcaaaaatcctgcatcttttgttctgtctcttgtcctttttgcaaaagattcatttttaaatgcacattttaagagacatttttgtatgcagatttgtgcacatttttccatctgccagaacatttgtttcgggtgagctactaggcacctgtatcatatgaaaaaaaattgaacttgcaaccttcctcttggaaattacactagccaggcaatcagcttcacaagcttttgttcctttaaagactgttaatggtggttgtaatttaattagtgatcaccatcataaaaaagtgctcacatgtagcttctaacttatgctctcaagagaaagctcagtgctaacaatccactaactctaattcaggtgagacaacagtgtctcaactcaaaagaagcttcttgatgtgaggatgcagaaaaacattacacctctatgtttctctgtgacccagtgcctacatcagatgtcaaataccagtcagtattaaacattagaccatcaatctctaacttcagcaacatcgaagcattcaagtccctcctccaattagtcctgccaaacaaacaaaattttctcttatatcactgcccaggggaaattctttgagccaaaaaagcaaattataactctgaacatattttccagctgtccattttccttttatttttttgctgctgaggaagattcaccctgagctgacatctgtgccagtcttcctctatttcgtatgtgggtagccaccacagcatggctgatgagtggggtaggtccacacccaggatctgaacctgcaaacccggggcgccaaagtggaacatgcagaacttaaccactacaccacagggctggctccccattttcccattttttaacattcttttaatttattagaaaatgtggccttacagttttatgggttctgtttctttaattcacttcttaaagatttcaagtcttctttcatatggcagcttcataaagttataaaatcataacaaaacataagagaaaaatcccttggccactatgtgatagtgtcaaaaagggccaaacgttgaacagaatataattcacagagaggggtttctgctctagattacactgtcttaagtttcctaagaaagctaattcaagtacttctagactaaaaatcaaacattcttgtttctcagagatagtgctgaagttacttcctacattttcccctattcagtttaataactttaactctagatgacagtcattccatttaaattatattttcacagctacacagaaaatggacaatttccccgactggagtggactgcttttatatgcacactattagcaaagtagtagtttcatagaccttattgtatagtagccctgaagtcaattcttcaaaatcccctcaatcaccaaaaattaaagcagatggagaatactattaaaaccatccctgtggcccttcttggaaactaagcacaaatatttaaatatgtttcaatttatatacatacatctaatctttataacagcctatatgctatttccctggtaaaaatagtccctagagaattcttgttaaaaacgcagtccctgggcttcctcatttgatttttttttttttttctaatttacttcagttgagccaattaaccagcagggaacacaagaaagagaaaaagtactgctcagcgactttagctatcctagaggaacagtatcaggaaaggtagactctagagagaagagctggtgtgttaactggctacacctctgcctactgggaaagttctctcaatagccagttaagggacctaacagagatccaggctacaattgggggagggctgtaggaggctagccttcctacttctggaattgataacagtactgaactggtaggctacaaagctttggctataaagtcaagttcgaaaaagcagtctgttcactttccctacaaacttgaacatatgggacttctccgtcatccaggtgggggccgtgctgaacaatttattctatatatcccaacagctttttcacaacatccatgaacatcaataatcattgctatttattttcctaacattttgtagcttatctcccatctgcacaaaaccagccacatggctgaaaatctaattttaaaagctttcaaaaaatgtgttttcactattacccattaggtcagtgaacaagcattccagggaggacaaaccaattctgcctaaaattcacattatgctccttccaaagaagcacttccgctaacagcctatgacgtatttgatatgaaacccttatagtcactcatattgcagagtttggaattctggccttgaaagaaacatttaagagaaaatttacagccctctttaaatgccttataataatatttccagactaataaacactactcaagtacagagacaatatcaaaaaagctgatgttaagaacctcaactttacaagaaaacactgccaacttcctctaaggaggaagtacagtggcaatttttcccatcataacttaataaaagcctccataaagaagtaaggtaaatctcctgatcatcacatgaccgaaaaaggataatattacaataacacatacataaaccactaaatgccaaccaaataaagcaactggagccactggaaaaccaatcacacatttccataagaaaaaaacaggaaagaaaggcaaacttttaatccattaatctattggtgaagagattccaaaaaagcacaaggaaacagatccaaaatacatttaataaaacacaaggtactacccaaagcaacaatagctatttctgtctacttacagcctgtatagcttcgaagtcccaagaaacagcaactcaggaaacagctgaaggtgatttctgtttaaacgccttttgagaaaaacaaaaacaaagcgtacgttacatagaaaatacccaacaatgacactgtgatttggtactgtcatgcctcatcctgtatttcaggaaagaaagaaatgacattcaagagaattcaagcattgcgaatcaaaagttggttacaccttttgttacatgactctttaaagcaattttccattatgcttactcagatgatgattactgaggcctaacctctaaattcacatcccgtgcaccatcagtcaatgaaaaagggtttcttgactcaggctctggtgtctaggttagcatacagcagaaataccacagtaaacagtaccctaaaataattcctacactgtcccaaatgacctaaattttcagccaaggcactgtggggagatggaactttcaattttgttagctttccatttagtttcagaaaaaaatgtgtgagaaagtgtcagcgtgatttgtccctataggcaacatcagaagaaaaccaacaaagttcaaactataacccacagtgctcgacccttaactgaatttaagttataactaacagcagtggcaaaaatgtttaaatcatgttttttaaatgtttaactgatattggaatgttttaaattttttataaaagaatttgatttcaactctaatacaatttaagccccaatgctatgtaactaagttcttttgaactgtgcacacttgccagaactgaggtactaatatcctgatcctgttcattttaagtatataatttaacatttcagtaaaaataaatgtctatctctctgcttttcccaaatttaaagaaaatgatgacaagctgatgcaacaaggcaggcttaaatgatttccaagtgctatagctttagaggagagtaaggaggcccagaaagtaatggcacactgaagaaatgggaaatatttcttaaatcttaaggagaaatgttaaggggacaggaaaagagggcatagcactcttgacctatttaaatggtcatcaggtagaaggagagttacacttatttagtctctagaggttagaaatggcactaatgattataactcttttttttagaggcttcttttttttttttttttggaggaagattagccctgagctaacatctgctgccaatcctcctccttttgctgaagaagactggccctgagctaacatccatgcccatcttcctctactttgtatgtgggacgcctactacagcatggcttttgccatgtccgtacccgggatcttaaccagtgaacaacgggctgccgagaagcggaatgtgtaaatttaaccactgcgtcaccaggccagcccctgattataactcttaagaaagtagatcataaggaagacctttctaagaatttgagatatgaagaaatggaatgatcttccttgagaaagtctctacctcacatcccacatatacccaagcagaggtatgttttgttttgttttgttttcctgcataggatgtaataaaaagaaatcctgcaaaagctgaaaaattggagcaggtgaatttcagaatttcttccaactctaaaatgctacaaggcaatgatggtaactataacttttgttacctaacatattatgaagaagttggtcaccacagcagcattctcagcacttaataaaatggatactcataaaaaagtctgccaacacaattaggggaaaatagtaaaattagtggcgaatgggtggacttcccacttacactaatttttatgaataaagcacataacaaggttaaatttaaagtgaaaccaaaatctttcatttatttattttttctctcttgggcatgattctgaggaaggagtactttcagagctgttagtatacagttttgataaatataacttaattatgaccttgttatatgtgtctctcaaaaaacagattacaaatattcacaatagtggtaatgagaaacactttctagggaaacaaccactcttggaaagacccccattgtccaaattgccaatcctgatttcttaaatggcagagacaggctttcatagtctgatccaaaccaccggactcacaagtatcacccctgagtctccagccacagcaagcacgctggttcagcccccagctcctgcagaggcagctctctgtgtacagggctctccttgtctccaaatggtactttctcacatcctccatggaacttgcattcattcttcagaacaatctcccaatttccctgcatcgagttagctcctcccttggctgtgtccccatatccccatggcacttgataaataagagtgcctcacagtgtattatatttattcacgtactgatctgtttcccactaggctgtaagctcttcaagtgtaaagatcaggtctttgtattccctccctcttccctggcacttagtaggttcttagcaaatgttgaatgagaacagactgttctctttgcattttgatatagctcagcaaaaccctagcatatgcattttatatttagagaaccttcttctgtcatgttctctgagataactgccttaggtttcttccttccttcctttctttctttctttctttgtggggaagattggccctagctaatatctgttgccaatcttcctctttttactagagaaagattgtccctgagctaacatctgtgccaatcttcttctattttgtatgtgggacactatcacagcatggcttgatgagcaatgctagggatccaacccacgaacccaggtccaccaaatcagagcgtgtaaatttaaccactacatcaccgggctggcccctgccttagtttttatgccactctccagctatacaaagtcctgccaccaaacctgctttcaggagccctatacagcaattacctcctttccttcccatcaaactccttcctctctgccattctcaacatcttctggaatttggaaggaactcactatgttgaaactaattcagatatctaagtgactgagagctgctactagatttcttgttaatgggtctaatcaacagaaccccatattgtgagaaagcagatgtttcagattgggtgcaagaagtgtctttttatcaattattattttcatattcctagtagttcttaattcactccaagaataatagctaacatatattaagcttactacgtgatggtcactgttctgggaggtttacatcaattatcacatgcattctccagaacaacctcgtgagtaggtatcattgttactgctgttttggagggagacacacagctcatagaaagtacagctagaacctgaattcaggtggggtgactccagaacatacactctgaatcattctgctcaaaaaggaatctaaacgttcctaaacacttcacgataatgtaatgctgacatttttctttttaccaatctttccttgggaaaaacatagttttatatggcctatttcataagcatctatgattgaactacctgaaaataaaccaccaaattttacaaaaactagctctatgttcagcttactgttttaaagatctatttaaaatacttgaaattgaaggaaaaatgaaaataaatataaaatatttttctctgaattgaaatggcttgtcattatttcatgaaaaatattatgaacgatcctaatatgtctaaaccaaccatgcatataagacaaggcagtaccatacaaaaaaagggcagataataggtgatacggtaacatgcatagaaaaaaagcataacttaaaaagagtataaatacacttttgatttccgtttttctattctttcttccatcagtactaagaataaatagaaatataaaacattaaaataaaaagtgaaactcttccaaaatattccttgaaggaaaaaatgtaaaagctgaggttcttgtacagtgaccagaaatcaaatctttaaagtaaagaggattttttttaaatccagaattactttaaagactattaaggtgcataacaatttctaaatagaggtgggaaaaaagtaacctagcttcttctaatgccacagaatacttcttagtggcttgacgctgataatatcataatagctctaatggaaatgagtattcaaaagtcaaaatctgaaggtcccagaacaggaaaacagcatgtcatgaattaagggtatctcagaggaggatttatgggggccagcataaatgagctccattaagcagaccaggtgggtcaattacctattgttcccagcaagtacactcaattgcatcaaaagagagagaacagagatttagtgagatcagctcttgtgtcatcaccagctacatggaatctgcccacaagatctcaggctgattgagaattctctgggtggtaattcatgttttcagaaaggtgtgttatgtgtgtctctgaaacacttagggcaaagatgaaagagatcccagtaactgtttcctttgggctacaggctatctttgtgcatgaccttcagtggggtgaatgatctttctgtatctcacaaaacatcactggcctctgaagtgctgattcttaacaacctcaatttgaagggcagcctgagcattcttgacaagcattgtttcaaattattatctcctagctgttcttgtgattcatccattgataaaggttataatctcttatgtttttcaactttcccctcaatttaatgaatatttgcaaccttcaccccaatccaagatgttaaatgaaaacaattttaccaaagccagtgaaaaatttgtgcctcctatttacctgtcattataaatgtaaggtattttagcagtgtgcctggtctgtactaagtattcaataaatgctgtcttaacgagtctatcattcacaatctcctatttctcatacataaatgcccttttcttgggtcaatttccacttgttttttttaaaaaatggttttattctaacatttttaaagcaaagattttaacatttatgtagttttagatgaatgaaataaagtttatattttcagcagtgatatcaataatttcatcctttatattccatgctggagagataaaaacctattaggaaaaatgttgcttcttcctcactccccttacttcttggtatttctctatatattcagagcaattataaaaaaatactctgaaacaaaacttgaaggaggtttcgtacgttcttcacatctcttctattaatcatatgctattataaggagaaaatcagaattaaattgatcataaatatgaatgtataaatgtcaaatttattatttacacattttattagatcaataaaataattcctaaactgagcttttgaaaaataagagatgctgaaatgcataataataaagtgctaactatgtgccaaacattgtgtgaaactgtacattatcttacttaaatcacgtactgccactatttgatataataattagctctgttctaaacatgaagaaactgaagtttttaaggacaaagcaacttgaccaagatcttacagtgtaattgaaatcaagtgccttctgatgtcactcttatctactgtttctgattttaaaagggaggataggagtttgtatctgtttagaaaacataatcaacagtacaaccaatgagtatttgccacgttccacaggagacaaggcaacagcatataaaattacaaagtgcctaagagaggggaatctaggttatctgcaccctgtgctccctaccagaacctggaagtgcagcacatagcaggagcaccagaaccttccacctgcagccagagtagatggatgctacacaaaaaggacaatcaaataatcttttgttaaatgttaccttaaagcaatattccaatgtattaacgccaaatcagccctgcttttaccaaactttcattctgaaagcgttttcaccgatattccttccagtccagcagatataaattgctttgaagaaagataagatagatagatagatagatagataaatgtccaagcagaaaagtctttcatttcacgtaaagttgtgaaattcagtctagaaggcataattcaagcagaaaggtatccaacaggaatgaaagacaggattcaatgtaaaatatttgacattcgcagcttccacaaatacattgtaacagtgcaaactaaactactcatttcaaggggaggtataaaggacacagcatccagcaaacactgtcacaaaggatgagcccaaaacagatgtgggaaaaataaacagccttgctgcttcagaatttataaaacgatccacaaagagcaaacacgccttctcaccactgttcaacttcgaggcccataaaaaacggtgcatgagaaaccctctctgatggattcactgttctgctaaacttctaagagtgcacatgcatgaaagccttacatgaccacagtcagtaaatgtaatttaaaatagttcaatatcacttataagcagatgggaacaattgaaattcaatggatatcacagattaagtgatatatacttggtcatctacagcatttttatctcacgcaatctacatacttggcttctgttactaagtttgatatgttctttaaagagcctttcccaagaaaacaactagtgatcttaaacttgggtgtaaagatgccagagaacaattcttctgagcttgcattcttttccaaggagattagcactgttagtttgttcttactttacgaaaaggaatgttatgtgttgcctataaacttgtaggattagtcagaagagggattcgccacatccttgacgaacaggggataagtggtactttccttcagacctgttccacaacatattctctacttgaactcatgggtagcgacctacaacacaaatcctcaagcactatagtacctcagcctcacactggctgtcacatgcttacgaatggtgtgtgcatgcaggaaaatgaagtcagcactatcttacaaaacaattaatgcgccttctagatgtcttttcatgagagtgaggtacttagtcaaatttaggctccactgtaaagggatttagacttttctaaattaaaatgagtattttctttacagcaacttggtagaaactttaagagagctaagtgaacaggtttattttccaggcttcatcataataatatttcaggactcatttttcaagcaaaagtgaatatcaaatgacaaagttagtatgaaaaattaatttcaaatgcaaagatactaaaacttagagagtttaaggcaatatttatcttaaaagaacacttttatgtgttattgataggaataacagtccaagcccatgtctttatcacttcttcagtgtccttgtgataagggtataattgtaaagttaatgcaaagcctaatactcaagataatctatggtatgctatcagttctcattaacataagttaggcatgtaagcatttaagcttgcacatgagcatttcatttcatttaggacaaaatgttctacaatttttttgacaaccctaaaaaatttcaaaaactttctcatacttttgcatctgtgttatcaagaacttgtaaaagccaatgatttccactactaaaaccctgaagtggcctggatctccttaaaaggccataaaatagaactttaatgactgcagcataatcctataaactgtgagtgaacaacagaactttataccagcccacaaaagtcctgagtcccaatgtgacattttttaaccctctaagacattatgcatcagccaagaaataccttgaattaataattttgcatagatcttttattgcagatatacacaggtaccttctgtgacgtattaaaaaaagaagcatacttcctaaatgttccagttttttactgcagcttatttgtagtttgtttttccttaattaatttccattgaattaactagtcatttaactaccttagatttcttttgaactttttgattaaacaatatgagacctgctaatacaatcgacatgaggcacattctcaaggcttcattttcatcccagataagcaggtactactggcatcacagcatccatggaaatctgccactgcacatgttaggtctgggagtacaggagtaaactgtcaaaacaggaagtaatgtgtgctcacagtgtgtacaagtgataaaacttaatcctttcacagtgattcataaccacactctgacgatgagcatatcatctgatgttgttttctatacaacagaaagaaggcagagaggggagacggaagggggcaggtagtcagactgggaaggaagaaaggaaggaaaatggggggattttaatacccaactacttcttgacattttgaccgataaccttgtatttcatcgattctttaaagtggaaaaaaatctttcttttgtagctataatgctgtgattcacacataacgactttctcgtcccatgctaaaattaaattcaactaacaacatgatcctgtttcttatcgattaaaagttggatttctaaaaaggcaccgatcttatcttctgttttcagatttgtcttctatccctagatcaagttaaaactctatcaacataaaataaaaagaaaaaccataattttgaaatactcacaaacatcattgggaattgctttgattttatcattttaaaatgaaaaaaacttagtaataaattacacacaaaattaatgttttatttttgttcttcacacaaaggatgaaaattaagttattataattctgtatgaatggcatttacaacataaacctgcatttatacaccttttcataatttagagtttgaatttaaaaattcacatgtaaattgctaaaaaccatataaactcacacaacacataattatttaaaagttagttcattgattacttcctgtttcttacattgtctcttgaagctttttggggagagaaaggcaatttttgtgatgttaatgacaccacctactaaaataagaacatacaccacaggccatagtaatttgattatggaactctctgggtagcttttttatttttactttttaaacaatatgctgaacaaaatttaaaatagtttgtttcacaataagctgaatgcattctttagcaaaactgccttgccatttaatgtatttaaaaaaaaaataaatatttgaaaagtgtatccacagtgttcctaagaaatggttttgaattccagagtcccaaggagatgaattggctgtcagataacaatgtgcttccatcagatggacttggcagttgtaaacaaaaggaattttctcagcttttcctcacaaatatgaaatatttgctctcagccaacagctggggtgatttaaagaagtcctgcatatatattagttttcattcgaaattacaaatcttcctcccactcggaaacatctgactgcatcttagtagaacagaaaattgttttgagatgaagtgacattcccagaggaagtaaaaggcaaaaaatagaacctacttacaactctaatcaaatttcagatcttaaggcatctggttaataatttttaggaaaagttaatttattcatgatgaaagttcaaatgatactccaaggtggtttgaaaagtaatgagtaagtttgttttgttctagtgcttctgataatatttaaaactataatataaccagaatagagactgcacgaaaagccactgaaattccttcaatgatttgaaagttatttaagaaacaaaatatatatgtgtttccatatgataactaaaagttattcatggaaaagcttttaacgtttaaatgataattttaaattatctattcatcttaccaaacattgaaactgcaatgatattatttttttaaagggataagctaaaactacttttgcaaggtactcactaggagttaactattcatgaaagcctatgaaagagagaaaagaataaatactttcagagtatttttatatactaagagataggctgtgaacttatgaactttgttatgaacttaaccaaatgttttgcctgtttttagcccctccaaaaactagcttgaagtagtgattttaaatttattttgaattacacaattttatttcctatattgcaacatttagcatggacaaaatttcacagtaaaataaattagacatctctgtgtttaattttacttgaagtcataaaaatgtagcctatatatttacaaatatcttagaagttggcaagctgtttttctacagcttgttacagacaattacacagaatgaacttccaccctcgggcccagtgaatcagaatatgtgtatgcctaaaatgaacttcatatttcattattctaaataaaactttatttttacctaaaatgcctattaaaacagccacggaaagttattaaaataattgttgctgcttttaatagagttgttatctgcccttaaaatgcaaacctattaaacttgaattatcaagacatatgagatatggaatgcatatttcaaattacaaagtgtgcaatttatcctaattatttcagacagaagttttgtcttttgtagacatatacactgtagacataagataataatagcctgaagtaatgtatatcaactcataagattttgtgtctgaaaaattaaaaatatattttaaagtctgcagtccatatttgatcttcttggaaaaaaagaattcatgttaaaatgaccatgctttgattacataattcttacttgtattcctactaatctttaaactcctttccagcagaagtatgagaaagcttctataaaataatgaagtaaaactgtgaatagcagttattaacaatgtccaccataagtgttaaatatcagaaagcaaatcttgatcactaagaatttaaaacacttcttcagagtcactaatgacacacaaagcaacagaatggaaattaaaatcactattagcaaaacttttcttttccataatgaaacataaatgaaaataaaattaccagctttcttcccacataagcaaagaaaacaaattagatgaatagtaagaaaaatacgcacatcaccaagtatcaaagcaatggttttcaaggaagtaaatggttcaggaaaataattctgtattttggaactttattacagttagtactatttttgcaaaacttctacagtttctaattgtaaattagtctgaaaaccatttattcaacctcttgtttctgtaaactttcaaagagtaagacatgaaattgaaaacatggtccttgaaattcaagtatttttaaaaatacagttatgtcgtcataagtttggaagtgaaaacacttacagtctctccagttctttaagatcctggaatgctcctctttcaatggtggtaatcttattctccataagctgactgaaatgcaaagtataacaggagtcttaatgttaccactcaccatctgagtaagtttcaattcagcaactgaaaccgtgcaacctctttcccttataaagttaaatattggtctgctttgagattcaatatcaaacttaatgatgatatatggaatagggaggagaaatagcactgatatcataaaactttcatagaaaatactaatgcagtttctcacaaaatttactatcaaaactaaaccttaaactacagcatatcctgaagagcagtacatgacactgcagctttgaaggctgtttttggtaaactgattttcaagtgagtccttaactgaatgaatcaatatactgtaattcatcatacacatacttcaattaacttacagatatacatcagaaattggaagaattcataatcgccaaaatgtgtcttttaaaatatgaacacaacacacaatgatcaaaactatatgttcactacaatgtaaatatttacaaatctgtgcataaaaacaattttacattactttgaatctcaaatgatgactcacccagaactaatttaacccactaattaaagaagtaatcatactgcaacaagtttataaaagctacaaagatataaaatacaggaaacaattcaaaatatgatcactgtatttttatagagaaatatttcccaccaaaaactctgtgaaaagctggcttacttgactttaatgttagaaattatatctatataagttttatatatctatataagtgttatttcctagaatagtctgaacatttttatattagtaataataaaatgcagacccacttaaattctttctagttaatctcaaatcctaaaagtgtatcaaatgtctcacattacttattcatattgtgaaagcaattattctacacttttataagcataaggcacttagagtatggtatagcaaacacttgaggtcatttctgtaatattgtttccatggcctgcatccaaccttaaaataaaagtctgtgtttttattaaaagttgtagtacaatgataaacaaaaagaaggaaaccaagaccttttaaagttttatgtgtctgtctgtccttgggacagtttttaaaactgagaccagtaacgattcaaaacatgcaaaaaacaaaagaaacaaaagaaaacacagaagaacatacttacagaactcttaagtgtcgaagaccagcaaaatctgtcttggtaatccgtgtgatgttatttccattcaaatccctaagagaaaacaagtaagaaaatgaaagttccattttatttctatcaatatctggctaaacaaagaaaaatgtaaactaaataagaactttaagattaaagatcagttccaattactaacatagtttacaaagtaaaagagaagaaagcaacttttgaaacacattttataaaatgattcttaatatgtttagcgtccacacttgctggcatatgacaagaaaatgaagtgattatgttaccacgaaaagttctcttttgtgtgtgtataggagtgttttcaatttttgcttttagaaggatgtctattaatttcacaggtattctgctattaaccattattgttaggcacatacactcccaaaaagttcccttcagcaagtcagatgaacaattttctaatactcttcaggaagaaatttgaaaaattcagaaccctaaccttaggtggcacggtgactaaacttcctaaggcaaagaaaaaagttagcgtgccatcaaaagaacggcacatcaaagacttgcatttataggcatttaccttctaacaattctatgtttgtatgaaaactaaactcttcatttgcagctcagggccccccgctgtgactgtaaagtgaaaactactagcaggggcaataatggaaatagtattcagtccctgacatttttgttcagatttcagcaccacgtttcctccaagtcacaaccccttctctggcatcttaggtcaagatctaaacttgccctggttccaatcatttcaagtaaaaccaggctttgctgtggtttcaatgttctccttcatagaagtaagttttctcttaccttgcctttgaaacatcatgtttgaaatctgtatttaatgtgtttatttcgtcaatgatagaattttataagccagcactgagtaaactatgttctgaaaactctttatagatccctcagaggaaaaaaaaattttcaaggacctggaactcaattgctatttcgtcccgagtgcattccctttttgttgagtaagacgtattagtgcttaaactttcgactgttcggaatggcataaaatgacaagtgctaggacagaattctgcattgccttatccccaacccactgtcggtgctgagcaaagacccgtcaagttgttgctacaattgttggggtctttcactggctatttgatgtaacgtaaatccctaccccccaccccagacaaacgtgggggatcacgttttgacaagacgcccttgatagggccccagctttcccagggctgagggagaagagcgaggaggagttgggggcggctcagttaggttgggggtggcggagccatttgcaaaggaagaaagggcccaacttctggccttcaaactgaggccgagggaaatgggttggataagaaggacgactccaggcgctgcgggccgcgcgggtatagacttgcgggtccgagccggtcctctccgctgccgcaaccctcgccccgcgggggcgcagaagcccgcgccctccgggcccggcgcagcggctaggggagcgcgcccggggcgctcgctcgggccgcacgggcggcggcctcggcgctcacaaagagcgcggcctccgggctccgcttccctgcgctcgggaagcgcccctccaggagcgcgtgggccgtcagcgccgggcggcgctgacttcttcattagacactcgcagagacagggaggcggggatgtcttcgggcagcagagcgcgaagagggaaggaaaggaagctgctgccacgtgaaggggcgcaaaaactgccaggaaggtggacgggggcgttggggctctgcaggaagggccggagggggcagccgagggccgcggggtcgtcgaagcagtcagatccgactcagcgagttgcggttgagagccagccctaacttcgcctagacgttgggaagcagtcctccgcattcgcccactcggacaggtcccttggggcccgccgccgccgccgcctccccggggaagtggggggcggggggctgtgtgcgagctgccgccaccctggggcatccttccctccacggcctggagaagcgcccctgggcggaccgagccgcccaagaccccttctcccctccctccggccccacgagagcgacacaaagccggggagcggaggtttctctcttttgagtgccccctcaacccccgcgcccccgcgccaccccgcggcgcctagagcggggattcagccgtgcaaccgatccgcgagggttggcaaccgcaaggtgactccgtgtatggagtctgggaacaaagtcagtctgccctgctccgcgcatccacgagtacttgtccccatctccctggcttcccaccccagagaagtcgccctcgcggggtgcgagcggcgggacgagggcgggaggcagggaccaagtgcagctgccagcgggcccgcccctcctgggtagtggcccctccctgggcagcgccctcccgtccttcgccctcccagagagttcaagcccaggatgtgcgtgcaggagagctggggagggctgccccaggcgcaggtccctgtgccgcttcatctctccagcctcgaagcactgggtgcgcgaccccgatgggggaggggggagagggaggaataacccatactcacagtctctcggtgttgcgggggatattcctgggcacgctgcgcagcgccagcccgtgacagtccactgtgctgcccgagcaggagcactgcgccggacacgcctgcggtgccacctcgttcaggatcgccaacattaaccccagcgacagggacagcgtctgccagccgtcgccgcgcatcttcccccgccgcctcctcgctcgcgggcgccgggggttcctctttagctcgttgctccgtgcgaaccgcgctgtgtcttcaggcccagtgcctggcgaggggctagcaacccagagtgtccgagtaaatgtgcacaaatagggaagtaacagtaataatggtcagggcagcagagctgacacaggtacacgcctcccacctccccccgaccctcctccagcaagtcaggcgctcctcgggcaactttaggtcctgaagatcaaccggcctggccaaggctccacggagaccccagagcagccgggaggagatcacgcgtcgtctgtctcacaaagatcaacttggcggtaaaagagctggggctcccaacggccgtgaagatgcgggggccggttgcaaggggaaagtgggtgctccgattccagtggggacggtacgagaaagcagaggggtgctcaagagaaatggtggcctcgatcaaagtgggctctccgaagctagaaggcgcaggagcctcgcgggcccggagcggagcgcgccggacgactgagcatggcgcgcgggggcgcacggggcgggcgcgcagcccggggggcgcggggcggcgctgcggggctcccggagcagctcactcacgcggcctccccccagcctgcggctcctccgcagccaggaccggtcctcgccgtctcccgacagccaagggcggtttgcaaacacacatgcacttcgctgaaggatgtctcggcaatctcgcctcccgccgggcgtccttggcgacgctccgcaccagggccttccccgaggtcacgcaggaaaaacaaaagggcaatcgggccgccgcagccggcaggaatatccactagtcacgaccctggcagaggaaatccaagaggccaagttgaggacgagagctcctgcgaggactgagtggggtctggctggcagacaggccggaaggagtggaaaggccaaggtggaggggtctgcttcctgggtcctgcccgggtgtcctgggcggtggcgaggtggcagttgggccggtgggatccgctcctccgaggagagccaagaggcagctgaatggcagtcctgtgtgcgtgtgcgcgcgggggtcagcccctctcgtctcccggatacgctgcagctccgcagcagacacctgatggcaaaggtggaagaaaccagagcgggctcctgggcggccgcggcccctcgaccgcccctcgactgtcgcccacaagtgggtcctccttctcaaagtgcaggaacttttcccaggctttgaatcccgtcccccacggccaccatgggagtcctcccgccgacgtcgcgacgccgcctggctcctggcgctgcacctgactcggcggccgcagtcccgagcagcccgtctccttccagccccttcccctctcccggctgccttcagcgcctccttctccagggagggaagtgaggaagagggatggcggcgacagggagcggggattcggtggctctgctggctcccaagctcctggcaagtgtctaaacaataggacggacacaacagccctaggctcgctcggctgcgggaaggtgggttgttgttgtaactggagttgctcgctcgggctgcctggcgctgagcgcagccgaacaaaaacgcgggccgcgcctccggggctggctgcgggcccccggacgctcccctttctcctcagcactcccgccgtgcccagaaagctcggccgctcccgcccgcgcccgggagccacggcgttcccatcactcgccgccgctgccgccgccgccgcctttttttaagcaccgtctgcggcagccaccgctgccaccaccgctgccgccgccgcctgcctcagccgtccgcgcgctccccaaataaataaccccaagtcagaagttaagccggcgccggccttatatacccagcggagcccccaccccctgggccccgccccgcgcggcccggcgccgcccactggctgctcgcggggagcccgcacctcgcccgggagaggtgaggccggggctgccagcgccaggcggaggcggctgcggcggcgcgttcccgcgcgccccggctcgcgccccagctcccacgcccggggaaagtttgcaggaggaaggaggttcccgggtccccgcccccagctgctgggccccagaggtgacccaggctccgagatgttcgttcgcagcgggggaatggggagagggcggctttgaacgcggctcgtaaataaacagcgctgccagtgcctctgctgcagctttggccacgcgatcctaagggggctgttgagtgtttgcagcgcagcaagagggagagacagacagagacagattatgatttaaattttcaaaaacatcctaccaaaatagatccgcctgcctcgtagacacacacatgtgtattttggggagcttaaaagttcagactttttgcaagttggaaaacggtgtttttcaaccttcgtgccagccttcccatctccgagccacccccttccgttaaccctttctttagtcacgcgcttaacaacactgtgctcccttgacgtcttgaatatgcaatacgctcgccgaactcttcagggcttgaatgtgtctatgtgattttgctgtcttaggagagaaaggagggaaaaaataaatccctagcaacgcacattgtaccagaaggtttcctttatttcagggaagttctggatattttttccccactatgttttgaaagagaatttccttgtttcttcttgtctctttagtgtgatgtgtgtctggcaactgctaccactcttccgctccccgctcctctcccagcaaaaccaatgtcactattggcttgaaatgatatctaaatgagtcaacaatttcgcttgaatttaaaacgcctcacctcgttcttgcttgtcccgtgccaccttacacgactttcacaggaatttgtgcaagcccctagcctaatgccagtctcacagtgtgataattatctgttacccacttgaaagcaagaggatctgtccaattcctgtttttattttcagcatctaacaatatgcctgacacgtaggtggtgccctgaaaatggactgatttctttaacaaaagaatatactcaatttgaaatttctccaatatccccattaacttttttcctacttaagattccaaaaacgtcttttcatgatggctacctttacctatgtcattttgcctgccctggaaaacttaaagccctttcgaggacatttccaaagacagtatacccgttagataactgaatgtgtattcttaggattactcattttaatgccatggatttatattgctctgttcttttaaagacttcaaaacatttaacatttattaactcatttgtccttctagattttaacttaaaggtctgttatataacttctttaagaaggagaaagtggaagccatagtcacattttcttgtaaggaaaatgagataaagaacatgtagtatcattgatcaaggattcttccaccctccccacccccccaccacctccaatgaaccttctttagtctgcaccaacaaattatgtggttgaaatatgtttattactaactcatttaatttcacaactttgatatcttgtcagcaacaagatgtatttttgttcaactgtatccatcacatggaatcgttgttctgtattttaattgcaaaaaacatatcctgcatgccaaatattcataaacaatgctatttatatcattgcacaatgcaagtcatagacctaaattcaagtttgagtccttctctggggtttcctttccattctgtgtaaaaccaagaaaagaggtgaaaataacattcatagcaacgtgcctatagaaacatattttttaatttgatgcaaatttaaataagaatgactgtaactaattctgagaaacatgaaacaatttctttgtgtcaccaacttttcagttaataaagggaactttatacacagtgaccagatttctcattttttaaactattattatgttattccttcagtattattgtggggtgtcttttggaggcttcccatgcttcagtactgttaacttctaggtcttaattcttcctggattatgttgctcccaaatgaattctgtgttctctttgactctgttacacccatcctgaagaaagccttctgtggtgcctcttgtcaccacatgaggtctccataaatcctgacctggattaaacagaagtggaatcctctagagtcaacattcaagtctcttattacattaaggaaaaaaatctagttgttagaataatttagaaaacaatctagacacttaaaaactcatacagtaaaaaaaaaagtgagcattttctcaatttgcattttctttgggaaaaaagttgtgaaattgggatatatgggacaaaggaatgagaaaagagaattgacgaaaaaagtaaatatgagtaaaaacaaaagtggataacggtaatagcattgatcaaattcatgaaacttatagaatacttccatagatctaactgctttcgtgttactatgttccattgttacaaaatgtgctcatgttcattatctaatttttctcacaatatttttgtattggaaatatagatatggaaccctaacataagggagattaagatttaaccaaaatttgtttcatgcctcttaagtgccaagctttttgatagagttaaaaccacagcgtaattctagatggttactattttatttgtgttcaggtgaggacgttgctcttcagccagatttgattaaatggcagagctgaaaccagaacctgagttctccaacctcaaacctcagttggttctcctacacccgactgtatctaaagagcttgaggaactgtcaggaatcaaggaatctataggtcatcaggaactcttacccgcatacagatgttcacgtctctctgcacacactgtttatgatcatctaaaagaagtagggagagctaggatgctcagcaccagcaccccaaggatattcaaatccaccagcttttggagttagcttaacctttgagatgattctctagggcagtgattctcagcctgtgttccctggaccagcagcatcagaaagctcagggattgtagttagaaaggtaaattttcagaccccacctcagacccacagaatcagaaactctgggagtgggagccagaaatctgggttctaacaagcccttcaagtggttctgatgctcactgaggtttgagaaccactgctctccagatctactctgtggttgtatctgagccacctaaatatggaaaatcaagcagcaatgaatgacagatagcgcctgctgaattggcttcagcttctcattccccggtatttgacaattgtacattcctgttaacctctagggggcaccaaaatattttcatgtacagccccacagaggcaacaagagtttgggttcattttccaatgaaatggccttgaggcgtgaaaagagcgtccatctcatgaagctgtttaaatattatgtctcagccagttaaatattcattatatttgttttttttccatgtgtatgggaattaacaatacctacttttcatgagtattgtgaagattaagataatatctgtcaaacttatgtcacagtgcctggtatagagctaggtgctcattaaataagggacagtattattattttcatcagtactactgctattaataggtagacatttctaaaatatttatttgtattgtggagatagattagatatttccattaactattacaatgatcaaatagcttcttgtactaagacctgggaatccctgggaagggtgagctgggggctatgcttcaagagcagaagaaagatcaaggcttggccaggcctacagtattccatgaacaaaagagcggagatgaatgcaattagtttcatgataattatgtcccacaatcctcttgaaggggtgaagttggttttccactgccgtaataaaatagcttgctggtggtttagtgaaattgaaaaggaaagtccaaaacctgtatatgctgctaagtgggaatgctttggattcctttggcaagctttggataggtcacttagatttcctggccttagtttttctcatttatataatgttgggacttgaccagttgaaccataaatccttcccagttctcagtaataatagtaactgtatttaccaactaatgtctgtgttccaaactctaggctgatcaccttgtataccttagctccttaattctcacaacaatcctctgagttagagagcgttttcatcccccatttatagttaagaaaactggggctcgtaggaattcattcaattagtcatgttcatagagctagtaagtagcaaagtcagagtcagtattctggtctgacatcaaatctcattttataaacatcatggtaaactgtttgtcaaattctgtgatttcagagcactgtgcaatgagtcattctatatataattaagacaaaagtacattaagagagatgaagatggagtacagtgacatctgaatattaaacttgggcaagaacaaaaaaagaaatggtaaaagaaatagttagcagtcaataatgcaggttaaaacacacgttaacattttaaagcccgaaggaagatacacagcaaaaatgttaatagttttatgaagttaaaataaattttcaagaatttaaccatcgaggaaaaagaaatacaattgtaaataattttaaattgcctaatcttttgaactactaggtctaaaaatgtgccttctggattttcacggaagaaagaaatctccctgtgttacttgaaagaagggacaggaacccctcacaccttctacaggctccttctgctaatttcaaaaaggttgacctttctcttatggggtcataacattaggctaaaattataaagaaattcactgtagtctaacataaactcaaaataaacatttttaaatcccaaggctaaatattatgttttagataaaaatcaattctgattaacagaggcagttcataaccactgttggaaaaatatatttcaaagtgaatgcctacctgatggccaaaaagtcattttcttgtatagagtctcattattgtcttagtccaagacttggcaaacttcttttgcagaggaccagatagtaagtattttcggctttgtaggccaaaggccaaaatcaaggatattgtgtaaatacttcatataatgaagaaagaaaacaaatttccacaaatgtcttacagatgtcattaaaaacaacaagtggttacaattttttgcaatacagatctactaatgagaattagggaattcttttggggaggattaatatttcatttattggggtccaaagtaagtatttcctatcatgaaaaccacttgctcggtttaatatgtaaaaaccatttttagctctctggcaatacaaaaacatgtggcagatccaatttggccctagtccaaagaggtgattatttgatgtacaaggtcatagtttcctaaagggttatgttaaaattcaaagggatgttgtaaagataagagctctgagctccgaagtggctgctctgtgacaagctgcaaatgtcgtcctcaggattatctaccactttctcgatttctttagctctgaaatgcagttctgcaaaagcatttaaagaaaatttaaattcattttattttaatatgaaataaattagtacaagatatgctgcatatccatttcttgcatgtgcttatctgttgaaccagacagtcctcatgtataaaatggagataacaataagtaacatttcttaagtatttactgtgtgcaggcgttattccaatctttttctttctttccttatttaatcctccttgaaaactgtattactttacagatgaggaagttgagggacaaaaaggttgagtaactttcccacattaccttagggatgagggaaatgaagccaagaaagtttaaataacctgtccaaggtaacccgctcagctaggaaagggtagagctaggatcttaactcaagcaaccaggatccaaggcatgagggctcttacttattcaggaatcataggaaattcatgctaatgaaatgaaaactgtgtttgtcaaggaagtatataaactgtaaaataatgtttcaatgttcttatttgcataatggttatttttaattgaagatggtgaaaacaaaaaacaacatagacacatttagtacagagttattgaagtgaatataatctgacttgagccaactctttttatctccttctttccattttaataggattatttcatttctctttcatgacttgggatacactctccttagttacataaaacaaaaggaatattttcccaccaaaacaacatggaaattatacaacatatgagacatgaatgaaaaatgtctatgtaaatttaggaaaagctgttatataaagaagattctctaagtataaacaaaaaagtgtaccttttcaataagcacaatgtctgaagaaccagaaatattactttaggtcttgctaactagtcatatctcgttgtgtaagaaatatcaactcataaagctgtgtgttcttcattgtccttactccataacacaactgaaaaatgttcctatgtatgatttcccaaccaatgcagtgaaaaaatactaaaaataaaatgtgaattctaatgcaattcaaaaaacagtatatcaaaataaagtaatttctaaaaacttgttcattcattctaagttgctgtgtgttgtgattgaagtaggtactataggtgtaaatctattcaggatcaccatcataattcttttttggggggtgtgcatgcatgagcatacgcacatggatgtgcacatgtttcacatatatattcctcttccttggtgtctttgccaggatctcttaattttaatttttctttcttaacttattatatatgtaaaataaggtattagattatcctacctccaagaagttgtgaagattaaataagttaatacataaaagcacttggagacttccagttgtagaacaagatgttatagtttcacatatccctcactcctcccctctaagtacaacaaattgccttcgaaataattcaaaagatgataaaaggactcagagggctgaaaagaagaatgtggactggcaagggagctcagggcctgaggaatgatgatactgtgagttaccagggttttctttctatctcacatagctctggggaagggcaagcccaagagagacctagtggggagccccaatacctgctccatacctagagcaacagctggctgagatccatctgaagcagcagcctcaaaggccctgtacaccaacctaaccaccgctgcacaaccattggaacactagcaggcaatctgatccactcactgggtagcatgattggaacccagcttttctggccctcctctcagtggcataagagacctagacccagcaccttcctgctctcctctgccccctggcagaagatgacccaggatattacatcagcccccatagacagcaccagtgggaactgagtaggagttccagcagcaataaactgtcattagaactaaaatccacagaagtaggccagaacctacatgctaaatctaaacatggtgactacaagctacaatagaagatttaaatagcatcaaaagtctcctaacataacaaacataacatccaggatacaataggaaaattctttatcatataagaagttggaaaaccacaatttgaatgagaaaagacaatcaactagtgtaaatcagttggtggagggggacgtcaagacaatttcagatgaaagagtactaagataatttatcttgccagcagaattgccctaagggaatggctaaaggaagctctctaagacaaaaggaaatgataaaagaaagaatcttggaatatcaagaagaaagaaaaaacaaaggaaagagcaaaaacatgagtaaagacaacacattttccttctccctttgagctttctaaatcatgtttgatgaagcaaaattatgacactgtgttatgtgattcttaacatacatagaggaaatattggagacaattatattacaaacagatgagagtaaagggaaagaaagggaggtaaagtttctgcagttcactcaaactggtaaaatgtcaacactgagatgttatgtatatataatgtattaccaagaacaaacctaaaaaaggtgtacaaagagacacactcaaaaatactatagagaaatcaaatggaattctaaaaaatattcaaataacccacagaaagccagaaaaaacaaaatagagaaaagaaaacaaatagaaaaccaaaataaaatggcagacttaagctctaacctatcaattattacattaaatgtaagtggtctaaatatgcctattaaaagaaagagattggtagagtggattgaaaatgatgacctaactatgtgctgtgtacaagaaactcacatgaaatatagcaataaaggtaggtagaaagtaaaaggatagaaaaatatataccatgcaaacattaatcaaaataaggcaggagtggctatataaatgccagataaagtggatttcagaacaaagaaaattattagagacagagaaggacactgttgttgttagtgctgttgagtcagttctagctcctagcaaccctgtgtacagcagagccaaaccctgcacagtccttttgcaccatcctctcatctgccgtcactatatcagacaaagctgtgctgctattcatagggttttcatggccagttttttcagaagtgggtccttctttctagtctggaagctccactgaaacctgtctaccatgggtgaccctgctggtatttgaaataccagtggcagagctttcagcagccaagcatcttgcagctgccacagtataacaaccgacagatgggtggtatgatttcccccactgggaaatgaacctaggacatggcacttagagctccaaatcttaaccactagaccatcagggctgactagagggacattacataacgctaaatggttccatcaaccaagaagatataacaatctaaaatgtttattcaaaattattgatatgggaatagattagtggttgaaaggagttagggacaggcatgggagagagtgagtgtggctataaaggtgtagcacaagggagccttagagtgatagtacaattaagtatcttgattgcggtggtggttacacacatgaagctgcacatatgattaaattgcttagaattacacacacacacacatgaatgcatgtgtaactaatgtaatctgaataaactctttggattataccaatgtcaataccctggttctgatcatcttctctagttatgcaatgtgctaatattggggaggctgggtgatgagtgcatgggatgtccctgcacttttccttgaaacttcctgtgaatataaaaaacagacaagaaccaaaaattacatactatatcattctatttgtataacattgttgaaattataacaaggaaaactaaaaggctttattcctaaacaatatgtaaggctaaagattacatacaaagatactgagggacaaggaaggaaaagtctttaaggagttataagtatggggttgggttatgggctgtagagaagggtgtgggaaatcctgaaagggaaactatttatggagaagggagaaggctgaggtatgatggtggctaaaggcactaagtagaccaaggggagtaagatttacggggaagaatgtgaagagtgtgtgtgtatatgagaaaagaatttaacagagtgcaggaaggatttccaggatggatgaaggatattggcctttatgagtaaggtatgggaactggaatcatgcaggggagacacaaagaaaatgtgtacacaaagagagaaacagtgaacagaggatggggtggcacaataatggagggacaggaggccttttatagatggaccaatggctttcaaagaggactaggtttagctaggactctacacacctataggttattcctataactgttctcaattagctatggaacttttgcaggccatttaaactagctgagcctttggctcttgatctgtgaaacggtgaggatggactagatggtttctaatgtcattcaagctataacaatccatgattttattgtcaccatatgaaacaaataagcaaaataagtttagatgctttctttatatgaacatcaatggtaataacaaagactaaaatgtcgttaacggtttgaggtttctcactttagggaaagtaaaaattggacaagcgctgtgttgaggtaggttaatgggaacaactgaaatgaaaaagaaggaaaaacctaagctgctaaatctttaaaaagaaaagttttcctgcattaaaagcaatggctttatgctgtaaaagagagtgatatttaattacactttcacaaatatttcgccatttcatcttcacaatgacaatgacatgcaacagttattatggttcccatttttcagtaaagaaaattgagattcatacaatttaaggatatgtattagattacagaactagttataggcaaagccgggatggctattcagatctaatttctagatcactttgaaccacctctaaatagacttatacacacaaaaacaatcagtccatgatgagatatcactacacgtatattagaacaactaaaataaaacatagtggcaataccaaaatttggcaagaatgaagaaaaattgcatacatgcattgctcatgggaatgtaaaatagtacagccactctggaaaacagtttagcattttcttaaaaaaaaaactaaatgaaatactaattatacaatccagccatcacattcctggacatttatcccagagaaatgagatcttatgtccacacaggagcctgtacacaaattttaatagcagcttaatttgtaatagccaaaaactataaacagccaaaatgctctacaacagatcaagggttaatcatcgtgtgtacatctgtaccatgaaatattacttagcaataaaaaggaacaaactattgatataacagtgtagatggatctcaaaggcattaggctgagtgaaaaagctagtctccaaaagccatatacagtatggttccatttaaagaacactctcaaaatgacaaaattatagaggtggaacaaattggtggttgccaagtgctaggaatggttaggcggagagaagtgggtctgacaataaagggacaactcaagggagatctttgtggtgatagaatagttctgtgtattgattgcagtggtggttacacaaatcagcatcatagaatgctacacacacagtgtaccaaatgtatgcatgtggtttgatgttgtaccatattgattttgatactgtagtattattaagatgtaaccattgggggaaactgagtgaattgtacacaggatctctttgtatcatctttgaaaattcccgtgggtctataattatttcaaaataaaaagcttaaaaacaaaaaccaaacagtgtcatgtctagaagcgggttatgatatagtggttaaggacactggctttgtacttgatttacctgagtttctatgcaggtcatataacttaatagttttatgaccttgatttaaatatgcttcagtgttttatctctaacactgggatcataatagttcctatttcaagggattgttgtgatgtttaaatgaattaatataagtaaattgcttagagtagggcaaggcacataaagagcgctcactaaatgctatctcttattacagatacattttatattatgagtctagtgaatcttataaatggtattatttctctattttcctttacagctagaaagctcaaagctgaattttggtcattccattaggcattgtgtatcaattcacatttatgcatgctaactgtatgacaattcttcatcttattttcctaatatttttacatagctgtttgctcttattctacaatattttatgactttgggctatttctctaactcgtttttttctctacaacttaattttataaattttcaagcacttttctaaatcattttttaaaaaaggtaagatctttataataaaaattatagaagcttaaaggaagaaacttagttatttagtaaaagtataattgcttatacaactgtgactatagcatacaacgcttgtagaaagtgtattaccactttcacattaggggattgtgtgatttagtccagaagaaatgtatattgggccctattaggtgtttggtacttgtctagaagacagagaaatgaagatagaaaagacatcaatcttcccattaggaagcttgttggttagtgggtagagaatataaaaataagacattagaagtcactctgattcatgtggtgagaaaaatatgtgacagaaactagagggataatgctgccctatgatacctgggaagatcccaggaaaatgggacagtaagtagggtttgaaggaatgaaaggagttttcttggtgcataattttaatgattacacatgcaaacaacataaaaccatgacccaaatgctttggcctataagaaaatatattatctcacataacaataaacccagaggcagaatggccccagagctggtagatcaggtagtgtatgtatatgttaacaaagttttgaaaaactcttacagaacatccgtaattgtaatgtttatttctcattcatgcttcatgcccattctggatcagttgtgccccattccaggttatcatcactgtttttccacatcatcttcactctaggagccagacccgctgagcatcctgtccctgaaacatttatgatcatcacagtagagggaaagagaatactgaaattcaccctctggctctagaacatgacatacatgtgacatacatgacttctcacatttcattggccacataaagtcacgtgactatctagcttcaaaaagatttattataaggaatcagctcagatgattatggagactgacaagccccaagagttatagtcagcaagctggagatcctggagagctgatggtgtaaattctaatccgaaagccagcagactcgagacccagaaagaacagatgtttcagttcaagtctgaaggcaggaaagaaaaaacaatgttccagctaaaagcagtcaggcaggaggaattcctacgtgtttaggggagggtcagcctttttcctcaattcaggccttcaactgattagatgaagcccgcccacattaggaaggacaatccgcgttgctcagtctatcaacttaaatgttaatctcatccaaaacaccctcacagaaacactcagaataatgtttaaccaaatatctgggcacctcatgttgcagtcaagttgacacatgaaactaattatcacactccccaaattatttacgtttagctgactcggggtgtgtttgggcatcaggtttttttaaagctcccacatgatccaatgtgcagccaaaagtgggaaccattatacaagaggttagtgtcccttataggagactgagggaatgtggggactagagttttctacttaagtaaacagggactttttctcccccctaacttcctgaccatcttaacatcaatacttgctagttttaatactaaatatagggaggaaaaaaaaatcctatttcttcctgcaatttggagtcataaagagatagagaaataggtcagagggggaaatctacaaatcaatatgccattaataacaaaaacagccatgctcaataatattttactcagatgttattttcttttggtataatacacaatttaactttggaattattgcagggacaaaatgagaaatctttaccccagaaccgactacatgagtaaacactaccccccaccctttaggaaaatagagactgtgaaataatttgatttgcttaagactggcgatgaaatccaaatatgagttaagggacctttaaaaaaatacttcttaagacattattttgtgctcagacatatataccattgcttttctttaagaaaatttccatttgaagatttcatgtgtatgtttataccttacaaacatacatgatacgcatgtaaatatatgatatgtgtatttcttatatatatcgttctgatatatccatatggtattttgatatttatgctttttgcctagtcagtatcttttcgttaacttacagtgatgatttttcatataattatctacatgatattcctataaatataatctaatattaaaatttgcacaaatatgtggcattttagatattttactttccttcaactgtgaaatcaagacatttatttttatttatggctgtagattaaaacctattaaccctatctagtcagataaggaatgtgaagaagtactcacagtgtttaagaacatttttttaaaaaaactccattttaatcacatctgggatagattcataaattgaaacctgcttaattggcaatttaaagctgtaggacaatgttatctctctgtattttcagaatgaagttccagctgttctgagaaagctaccagaagattgagagaaactgccgagcatcctggggagaaattaggagtcaagagccacgttagcttgtattattcttaagtcactgtgcaccagcaataaatgtaaatactgttaatggagtcaaagatctcaaatttaaatttaacctgcttctcgcagggaaaagtatcacacttttctgggtctgaacttcatcttaagactaacaaattttgaaaataaatttagataatattcatgattcataatgcatcctcaccaggtcaactatttaatttggagagtgcttcatttttattaaagaagctgatgagtttaatgtcactgtagccatcaggaaagtctacactataatgtaataaacaacttccaactctctggctcatgacaacagaagttacttctcactcatctacctgtctgttagaggttggctgtgagctttgcttcgttgttggttactctgtctacactcaggcagatggagcagttactatctcaaacatcgctgctcatcgtggagtcttacagagcaatgaaaagctccttcctggaagtgacatcccactcccatcagaacccactggccagatctggcaagtggaacagatgtatagtcctccacatgcccaggaagctgaaacctggaaatatttggtgaaaagcattacggactgtcactttctgccctttagatcactctacttccacaggcaaaatatactcctgcttccccaaagaaatcaatcctaaagccccatttggctgtggcatcaagctcaaagtctaggctttctgggtctgatgcagtagaccccgcatcaaatctgagtgtgatttctcttgttctcgacactcatgaactaaaaagttatttttccatgccctctaaatatatagtagcagaacagcagatgtttatgttagtaataaaaatttttattcatagggtactatatatttagagagaaaattatttttgccttaagtaatgttataatcaaaattttacacacaatttgtgtttcattgacagtaatgccaaattaaattacctttcagtgtttaggtagtttttttcctgtataaatttcaactttgaaaaattttgccgtgcaaaggcagtaggaactgaaagtgtcaacaaattttgtaaaacaatactttaattcagaaataaactatggattttacacatgatgttcaaggcatgtgaaggagtttcatagataaattatcagatcgttgaaaatgtttaaaatattttaattttatgtattgagttactatcatttctattgtaatttcatcatctttctttttttttttaaagattggcacctgagctaacaactgttgccaatcttctctcttttgtttgttttggctttttctccccaaatcctcccagtacctacttgcatattttttagttgtgggtccttctagttgtggcatgtgggatgccacctcagtgtggcttgacgagtggtgccatgtccacacccaggattcgaactggtgaaaccctgggccgcggaagcagagcgcttgaacttaatcacttggccatggggccggcccctcatcatctttttaagatgatatttagatacaactgtattactttgttattctttcaaattttttaaagttgaataaggcaaaccaggaagagggatatttgttcagttttttcaaatttctattccatcaagactgtattttaatcttaaaatggcaagaaatgggagtcaacgtgaagagagaaaaaataatccagttataaaggggcacaggatttgaatagacatttctcccaagaaggtttactaattgccaataagcacataaaaagattctcaacgtcattagtcattagggaaatgcaaatccaaaccacaatgacataacatgtcacacacactaagatggctataatcaaaaagacagacaataacaagtgttagcaaggatatgcagaaatcggaactctcatacatagtttgtgggaatttaaaatggtgccactgctttaaaaaaatagtttggcagctcttcaaaaagttaacatagagttagcatatgacccagtaatccacttctagatatatatccaagagaactgaaaacacatgtccatataaatatgcaaatgttcataacagcatttttcatagcagtcaaaaagtggaaacaacccaaatatctgtcaatggatgaatggatacataaaatgtggtatatccatacaaaggtatattattaggtcttaaaaaggaaaggagttttgatatatgctacaacatggatgcaacttgaaaacattatgtttagtgaaagaagctagacataaaaagacacctttctatttataaaaaatctccagaaaagataaatctatagaagaagaaagttgattatcagtttccaggggtggagggaggttggtgtgcaggggaggtgggaggaatagggggtgattgggaattgataaggggtttcttttttgagtgaggaaatgttctggaattagataatggtcatggttgcccaactttgaatacactaaaaactactgaattgtacactttaaaaaggtgaattttatggtatgtgaattatatctcaataaagctgttattaaaaaaatatgatgaaaattagattatggtgatggttgcagaactctgtgaatatactaaaaaccattgaactactttaaatggatgaattttatggtatgtgaaattatctcaataagtctgtgaaaaaaaaaaatgaccagaagactgtctccataggaattgctgattataggtaataatctttatcctttatagtcccaaaaacatttttttccttgttctaaagtcttacattttgttgcaatgtcatttttcttacatatttcatgtgtagtttctattgatttaaaaacacgttaaaaaaattttagtatatattttaaaacttttaaaaagctaaatatccaaatttagatttcttggtaattttttttggtaagcttctgcaaccttattactaataagcaacagttcatgacaaataatagcacatatttgatactaatgtaaactttcacctgagatcatgtttcacgctctgtttgagggtcgtctgttcatttctccttactcttctgacttctcctatcttgcctagtcaaaccgaattgttgtttttgtttttttttttaaagtttggcacctgagctaacaactgttgtcaatcttcttttttttttctttctgctttttctccccaaatcccctcagtacgtagttgtatatcttagttgtggatccttctggttgtagcatgtgggacgttgcctcaacatggcctaacgagtggtgccatgtctgtgcccaagatccgaaccggtgaaaccctgggccaccgaagcagagtgcacaaacttgactactcagccacggccccggccccgtccaattgttttaatagtaattagatggcattatcatcatgtgtccaactgtgtttataaggtcaatattttcaatttgttttgtcaagttatttgttccatctttgggcagatgtagaaaaacacattacattctaaaatttttgtaagggatgccattgctatcggtaagttgtgcccatgtctcctagcaacaaaatctaactatatgctatatctgttcctgggtttttggcccagattttatcttgtgtacatttttaattatcaattatgttagcaccattatcatagccatagaatttcttttaaatcaatgctgaaaatttgctttttagttcttaactcagaatgtataattttacaacgagtataaaatcagtgaaattaactttattattttcttctgggcattcaacaataataatgatgaatagtagttgctcaatataacttttgtccctggtacaatcaaattgaattgaataacattcgctttttatttatttataatttcttattttactttattccttgttaaactggtaatctcatttgtatttctccattccagatagtaaaaaaactattttttaaatctgttttacatgatctgctatccttgcaacaaatttggaaataatttctaataaatctaactttttgctttcctttctgtaaatattgttcttttagtgccataaaaagcattactatgctcaactaatattgaacacatgatattattcttttctatattggcattaatgtattggcatttatttatctttgttgaaagttatttattgattgatgtttactcagcctttttgagtactagtaattacatttgtgaattatttttattttttattggaaagtgatatcttgtgtttctttaaccaaaaatgtgtttccaatcatggataccttcattagccaaagctggacttgaagattagttgggaaacatgtaaatgtagtaacaatattatctgccattcatttagaatacaatgccaatgcctacaatttttccccttttaaaagaattttaatgtaaaagaaaatactaaattttctgctatgtacatccagtgaaaaatcatattcattaatttgaatcagattgtgttttgccaaaaataatctcatgttgtcagaaggatgtgacagccattttccacgacgataatccaaaaaacatagtaacactttggagatttttgtctttttctttcaatttactcattttataaatgtacttttatgcatcgtttaaggagaccagaatggtatttgtttcttctgagttgtgaattttatgtgaataattctctttttcactctcattgttttgagatgatgtttacatgaagtttgttgggatttcatctaacttgttgctcacttttattgttttgatcagtaaatcttccttaaataaagaatccgtaatgccttgtttgcaaatttgatgccgagcatgctcaagaagagtctgctcacttccattctttctagtttttaaaatttcaaacaggcatctcctttgaagattttccattttctttttttctcttctgatctgtacttttgtgttacctgttcctattgcaatctcaacctgtacattctaaagaattaaaaataaaacatgacattattcaaaatgacacaaaatgttaaatttcatccaaaagcatagatgaaagaaaataaagaacattaaaaattacaattatgtttttaaaatttatttttctaaaacatgagaagctatatattcaattaaaaagaaagctacactatctcgctacatatgtgacacattttaaaataaaaaatttaaggcaaaactatatgaagcaaaattaaaagtaattctaacattcagtgcatgtctagttgccaacataaaagactcatatcatattttacatgttatgtatgtatgtgtttgtatatataagcatatgtatatgtacacacacatagatatagtaggaattttttaatattgagaaatattgttcagctataagcaattcagtcgtgtgaacctatgcatagtttactcattgttatcatttattctcctctactgatatctagaattatctattcatgtatttttttgtagtatattcattgcataaatctctgaaagacagtgaagatatcagtaaattccaaacttatggtgctatttgctatgtatagttggcagtagtttatcggctgcttgcatctgttcttccttactcccctcccttcctcactcagatattcatgtggggatttctctccccgatgcagtgtacaagatgagagaaaagatgaccatcataactagctctagagacagtctctaattacctcacataaatcaccattttccaattccatggcctcaccaccatccagaattaatctcagactcgttcctggaatggtaggagagaagttttctctctcctactggacataaatagctgagatctaattacctacgtaactcctaacaaaactggcagccagtcctacaaactccagaagcactctccttaaaatgaagctgacacttcatcttggatggcagataggaaaaataaaatgaaaatgcaccagcattggcattacccatcgctgaccagccaaaccaaggagcaggcacatgaaccaaccaaggccagacagatgtacagtccttggaatttcaaatttgattggaggggcacaaagagtggaaatggtactcattcatcggggaaacagttcttgcagagattgtcctttggttcctcctgcatagacccctggatccgttcttttttctttacaagcctgcttcttcagcttttcctctgatcctttgagttacactttatttttgtgatatattaatttttggcttaagttagtcagagtccttaatattttagattattgtttattgaatattctctttcctttccctcctactgtgggcacaatatatttcctcattctattgatattgtgcttggctatgtggccaatggaatcaactgtatccaagcccaggataggtcagccaatactcagctgacctacagatgtgtgagcatggacaaataattgttttttgttttttgcggtatttctgaagaggaagattcacccttagctaacatctactgtcaattctcctctttttttgcttgaggaagattatccctgagctagcatctgtgacaatcctcctctatttttttatatgtgggtcacctccacagtgtggctggtgagtggagtgggtctgtgcccgggatccaaacctgcaaatccaggccaccaacgcggagcacacaagatttaaccacttggccacaggaccaggctcaaatagtaaaaattgttgttttgagccaccagttttgggatgatttgataaaatttattactgtggtaatatacgactgttacagtttctcacttgcaaagaactgacatgaccattactttcttttgcaaaaccaacattgcaaagagatgaagaaaagactaaagctgaaagtctcactggcagattcagctccagctcctgctacgagacaggcctgtgtgcaaatcatagatgctgtatggccaagacatcagctaaaatctagttaatcagctatctagtactttttattcagcgataacttcacataatgtgtctctcaagaagtcttgctactgtgctgtgaaaaagtaatacaaatataagagtaatgcctctcttagagagttcttcactaaaagcacatttagacccatccttttaagtaaaacatcttactctagtgtaccttcaaaatattcaacttgggtaaagcagctagaagagactgtaaaaatgtttttaaactgtgtttaggaagcatttggagcaggcaatcagatgctgtttccattactacatgtctagtggactgatggttaagctatttgcaatgtttagatatttctcagcttctaaactatgaaaatttcaaaccaaagcagtagtccttactcaaggaatgaaatttgatgatttattaaagttattgcatacattagaacactgctagagaccatgggaatgcccttggggaaattcattcccacacctgatgatactttctccaccagtgttaccaaggatatcccttataacttttgacagagaataacattttatggtcttctactagaataacctacttaacaagtattccacttgaatttcttatttatgaactgttggggaaatgcagtaacttcgtgtgattcacttttagaagggactacaatgcatggataatgcaattcaattagtaattatttgtgtttggctctagagttcaagtagttggacaaacatgttcaggaatggatgtgaatgtgggctctcaacccaactatttcaatgtgtattgaaggcaacagtgggcatactaatgtgcttttgagtaaccagagacgattcaataaatgtttactgactcacaattccatagttctctacttacgtgtttactatatttaaagaatcaaaatataaaattagatctgatattctctcccagagtttcccacacaaagcagatccttgctgaacttcagagatgggttcagaggggcattcaaatggttctctctgtcccatgggtccaaagagatgctcactgatgactacttttaaatatgcctgtagtgactgttctcaattgtttagtgattgcagtactctaagcaggactgtattagcttcctattgctgctgtaacaaatcaccacaaacgtggttgcttaaaacaacaccatttattatcctacagttctggaggtcagaagtcctaaaaccaagttgtaggtaaggctgtgatccttttggaggctctaggagaatatttccttgattttttcagcttttagaggtcacttccatttgttggcttatagtctcttcctccgttttcaaagaaagtaatgtagcatcttcaaatctccctctctgatttcttcttccattgtcacatctccttctctggctctaactctcttgcctccctcttccccctctaaggacttttgtagttatccaggacacacctagatattctaggataatagccccatatcaagatccttaatttaattacatttgcaaagtccattttgacgtgtaagataacacagtcacaggttctgaaaattaagatgtgggcatctttaggggtacattactctgtctaccataaggaccaagactccaaggatcataaaaccccattccattccaactgttaactgaaaaaaattggagaggaaataatagtcaagtttgcagaaaccttgttgctaacaacacacataaacagtttaatacacacctgataaaaaataattgagatcatatacatgattcctatattactaaaaatatgctcaaatttaaaaattaccagtgatttttacaaaacttatcttgataatacacgcaagttttttgagtagtatccagtatgagatagcatatcaccaagaaaaagtcaattaccgggattcatgggagataagtatatatctacattagtgatagagacatgaatgatttatatttaagtttcagtacgtgccactcttaaggcttagttatcagaaaagtataatctccaaacatataaatatgtgttatcatacactgtagaacttgttgaacatgtgcaataaaaatgatactggtaaagcaaaaccaatataaatttttgcaaagatagcagtagaggaaaaccatcaccaaatcaggtaacacgatcatgcactgacagtaaagcatcttttctgaatttttcagaaatatttggctatgtatgtacgtgcagtaaaagttcagatactttgtcaagcatttcctggaagccagatttcttagtataataccatattagagtatttcagaaaactctttgaaatgagctaattctaaaataaaaatataaaatgcatcgacatttaataactcactcagtaggttactagtaagtagcccttgtttgtatataaatcaggacagttctgaaatgtgtgtcattcacacataggaaccccagaaactatttgcctttttgagaacaggcccagcccactgtgaacattcttgtgccttccaatatcattattttaaaaatcattattttagataacacttttttctcctcctggaattcccttcctgtcccaaccaatagcctccatttggctaattccttctcatccagaaaaagccagctcagacatcgttaggtgtttatttccatatgatcccagagcactctattcagtcacctctcttagtgttgacaacattgtgagtttgttaggggcagaaaacccgggctacttatttttgtaactctgtacctctcatagtgatagaaaaaggtagcagtttaataaacatttaaggaaggaaagacattaaggaaggattataatagtgctaatagttaacatttatgaaatatttgctagatgccaagcactctttcaattgctacatgtattttatgacaaaaatagaaaaatagtttatctttacaacaatatgaggtgagttctattttagaggagaagaactgagtcatggaaagattaagtaacttgttcaaagctatttagagataagaaaaagaaagcaaaaaattagagggtggcagggaaagggagactgcagggatattttgaccccactggaagctacaaggcattatccatcacttccatgagcttttcactgtcctccaccttcctaatgccttcatcttcttcattacctgcactgagtagaggaccatcattttaatcactcgtccacaactttctcattgtgtcttacttgcttagcaaggtcccatgttggttaaatccaattctttgcctactccacattcgtatttgtagctagaggaaaaagtgaacataaagtgaaccacacaaaaaagtgtggtaaatcatggttaaaaaaaaacccctgtgtttactggaacatcactgtaaattcatgattgctaaactcaagtgaccctcctatatgtccttactctgtttggtctctctgttccagaagattacatcacatcttctattctctcctcaagcccctacaatccctcctcatttctcactctgagatgacggtcttgttcaaattacactgaaaaaaattaataacagagaattgccatgcaactctcaaaccacatctacccaacttccatctctatccatatagtctgcttccttgtttttactatggaagaactacttttaagtagggccaggccctgcacttacattctagataccatctcttctcacctactcaaggatataactccagtaatctccctctctttccagcattttcaatttttcctttttaattggattgttgccaccagcatacaaacacgttgtcatttctcttatctaaacaaataaaaacaaactaaaaaaaatttcatttgacctcctatcaccttccagctatgtgcctttaaagcgaagctccttgaaagattactctaagcttgttgtcttcagttcctctcctatttcctctcaaactcacttcagttagcttttcttccccaataacacttcctaaagagcttttgtcaaggtcacctatgaccattagttggtaaatccagtggcgaattttcagtcctcgttttagctaaactctcagcagcgttatattggtcagagctgatcatacccttctcaaagaaacacctttcatacattgcttccagtttccttctgttctattggcagttcaacttcatgatcctttgttgcatttcctcatagccctgacctctaaaccagtggtcttcaaactttttattcatgtacctccttgcccatttttttaaagttgaaatctaaatattttcatcttaaggttaaatagttgcaaaagatataagtgtgacatattttaaacatggtatttcacataaaactatgacatgacacttataaatgtatctagtaaaatcctaatgctatagtaatttaatacatacctttgtctgttttaaagtacacaaacatggttttctttagcagtaggaaattataaaccatccccttttctccttagattattatttccaatgcattcccgtcacagaattttatcctggtataattttaagccattttgttgtgaaatacactcctggaaaaattcacaacagaaagacacacagctcaataatttatgatgaggcagactcgtgtaaccaccactcaagagggaaaatagaacatttacaacatagaatccttgcctttccagtcaccttttcctccctctacagtatatccacttgcatgtcttaatgctttgtacggagctttcatttttattagttcgtgtatccatcagtgaatgttacttattattactctgcgtcacatctattcctctttttcatagttatatgtgtgctccctgaggaacatcattcatattgatggggataagagaggtttccttataaaaatgtcacttggttctttgaacacctttccaactatatgcccccaaattaaatgatccatcatcacaagttacttttaatgttttggataataactgtattagaggcccctccaattttctggcaatagaagaactggaaactgcctgatgtctataaagttttctcagtcattagagtacaattagacaataataccttcaagtttccccttgtttgaagtccaaaggtattaacacctggggcaatgtaacataggaagattcacaatgtgcagagaatataatcatttatctgtaaattgcataaagacaaaatattttgaaaggagagatgggaaataagaacacataagatgctcaatggaagcatctcaggccactcaattttagtcatgattatttatattagtgttgaggacatggaaatctatttcctcaaaattattccagcctgaatgattcttagaaaggcccaggatacacacaattcagatagaaatccacagtctaacgttagagtttccaagattttacccttggaccatttctctttcctgttatattctctaacccaatctctggctttaaatatcacacacacacacacacacacaaacacactgagatctcccaaatctatacctccagcccagacatcttccttaactccagatggatatatatgacttgatatttgatatccctatttgaatgtttaatagacatctcaaaatgaatatttccaaacctgaaatttcccatcaccaccccaaactctatcctcctttagtctccctctctccataagtagaaaatccagcattcaagttactcaggctaaatttttcttgctattccttgaacacaccaggcatactcctgtctctgaggctttgtatttgtttcctggatatgacaccctcttctcccagacacctgtagccccgttccttaatttctttccaatctttgctcaaatatcaccaaactactgatactttcaatggtgtgagcctcctctcaactaccaactgcacactctctctcttcttggatttatttttctctggagcacttatcatctgacattctataaattttacttactttaaatatctcttttcccactagaatgtaagctccatgaaagctggacttctggtttgttaattttattctatatttccagcacatagaagagtgccttggatgtggtggccacttagtaaatatttactgaaatgaagaatgaataaattaatcacagagtagaagtcagtaaaataactcaagctctctgcaacaagcttatgggatgacttgaaggtcaaaccaagcatgatgctgatgaataggatatgagcaatgaggcagaagggaaacttacattacaagaactacctgtcaaaaaaagacggactgatatgtagcagcatagaaagaaatggacagcaaatccatttaagttactactgactgagaaaatgtaaatattcagggaacagtggcagcagggtttgtacaactgatgacttccaagggaacaacaatgagtgtgcaacattgagggtgtaagttcttaatgactttaagaactctcaccattttttagtgacatctcatatttgagtactcaaattagaaaaggttatctggtagcaacattgaaactaaatgtctttctttttttttcaaatttcacgatcaattctggtttgctgagtatgagcaatgacgcaaaatattctaggagagaacagagtgccaacgatggaatatctgttcttcaatttgaaaaagaactggcatcataaatttattctgaatgtggaaattagactgtctaaacttgtagagtaagagcccttcagaagcgcccttccaaagccctggagaaattaccttattgtgttgcaaactttggcttcattcttcctgtcaatgaaattggcattagaatatttgatcagtaggaaaacagcgcattttggaatcaagcgttttcttctatttgtgtaggttcttggtgccaagtttgaagcactggaattctgtgtgtgtgtgtgtgtgtttggatcattgtgacaatcttcttttatctagtttcagcgttgcatttcagggctttgacttaaaaaaggctgaactctcttcccatcaggatgcagtcatggaatcaacctataaatggtgactcactcccataagtggggtacaatttcataattttaccaagattttcctagaaaattactcatgctttattgtgcacataatcaattgctgtgaaattggcatagaacccccctcccagcaggctgtctggtgctatagatctgaattttggcggtgcttcatgctcctaaacatgcaagtaatttgtagcatgttcatcatactactacctatgtgaaaggtcaataagtagattcacttttttaaaactgattatcacagtgctttgcatgcagttggtcctcaaacacattggctcacattctttaaatatgggagctggagatttggttaactttttcagaaaacaaaggttcctaattctttggttaaggtcagaattttagactctgtgcagacagatggagtagataattttaatgtccataatccacctatggaccaagccaattctatgtgtttaggaggaagagcgatttttttacagcaccaagaaaccattgaagacattgttgtataatctctctcaaagtttcctgctgaaaatttacttctgcaaaatatgttctcatctctatttaaagttgggtattctgaggacctaacttagaaaaatcaacagttttcttctttatatgaagattctttttggaaaatagcattaaaataaagttagatataaataagacttgcttaaactgtgtttactaagccaaaatggcttcggtaaattacgtttaattttagcttagggaaaacttgcataacatgtatgaaattggatcggcttttttgttgaggattgcttatcttgattatgaaaacatttaacaaatagctgtacataccacccatcattaagcaaaaaaatcactatcattactgaccatccaaaggggagaaatagttcatttgctgatcgccttttgcaattggtgtcccttgttaatttttaggggttctctggaaatcattgttttctctttccacatggtcttacttttaatcagcatgacctatttcaacaaatttgatgaaaatccatctagcctctttgtatgtgtttgtgcaataatatcaaatagaaaacaagacgaaacctttttccacatgtatagatatgcatctttactttaaaatatcttttattgattaactacttagttaaaaaatctagaatcctactgatatatccattgcactgaattctcctagaatttaaattatttttttgagattaagcatcaaattctcatcctgacaatatagtggatgaaatattctaaaagctcctccaaccacaaaacgcttaataatgtattgtttaaagaggacatgcttaaagatgcatggatgatctggcaagaaagtaatggaaagtctggggagagttgagggatgaaaaataagaaaacagaaacaaatcagcaatctgagcattaatccagaacagcgagtgtttgagtattgaaacaggcaggagttctaaaaccacagccaaagggttattttactgggtctgggtgaaggccttcattaaagatgaagaaactgacagctgaagtggctctgggtcaccaggtggtagcagtctccttcgagactctttcacgaggcatttctctccccagtttaggggtcacatttttcactacccaagaggagaattgaatttaaagagctttgggtttcattcatgggggaatgcacctccaagcctgtactcaaataattatgatatatatagttccaaaaacatgagcttaggacacaaataaaatcacataaacacatgagaaaacaaggcaccatgaatgagagtcagcagaaacaacaaaaagcacaataagattcaggaaaacttaagatgttagaatcatcagatacaggcttcagcgggtgggtgaaaaagttttctgatggagctaaagttaagataaatgtggaaaaagtacttagagaagaacgaagaggcaaaaagaacaacaattaaaaagagcttaagagttttcaaatatagagctacaaattctaatacctgagcagattttcaaaaggtaaaaataaacagaatagtaacaaaataataattattactataaataaaattttctagatacatttattacagctcaggcagtgttctaaccctatcaggtgagtattattgaattattattattttgttttatagatgaggaaactgaggcaggaagagattaaataacttccccaagactccatagctggtaagtgacagagtcaagattcaaacacagacagtctagtggcagagtctgtgcttctaataattaacatttaaattatggtgactatgaattttctaaaacttgacaaagagcaaaagacataaatcctctgatttggaaagtacaatatacccaagaagataaacaaaaagaaatccctactaaacaccattatgaaactactaaacaccaaagacagaaatagaggaatttaacagaacagtgtgaagaaataatacacttaaaagactgaggaaaagcagccttttatttaaaactatatagcctacaaaataatgtttcaagtgaaaggacaaaacccagacattttcagacaaataaaactgaattattaaaggaatggagatgtttcaagaagaaagagaatccaaaagaaaaggatgataggggctggcctggtggtgcagtgattaagttcacacattctgcttcgaaggcctggagttcgccagttcagatcccaggtttggacttacaaccagcttgttaagccatggtgaggcaggtgtcccacatataaagtagaggaagatgggcatggatgttagctcagggccagtcttcctcagcaaaaagaggaagattggcagcagatcttagctcagagctaatcttcctcaaaaaaaaaaaagaaaagcatgattaaaaaaagagttggcaagggccagcccctgtggcctagtggttaagttaggtaggttccatttgggtggcccaagttcagttcccgggcacagacccacaccatttgtctgtcagtggtcatgttgtggtggtggttcacataaaaaaaaaaaaggaagattggcagtggatattagctgaggtcaaatcttcctcaggaaaagaaaaaaaaaattggcgagcaaaggaaattgtaagcatgttatgataatgtctgtctgagggaattagaaaaaaaacaagatggaaagtttgtgtgcccatttgtttgtgtgtgtgtgtgtgtgtggactgtctggagtctgaatgttccaattcctgtgaagtgcttaggaaaagggtaaataaattgattcactttagtctttgtgaagtgaaacatggaagttaaaaaatgaataaccatttaaagaagagaatagagtggagtatatcacttccaaactaccaaaggagaaaagatggaaagcaaaaaaaaaaaattcaacaaatgcaaaagaagaaaagagaggagaagaacaaaaaggagcagagcaaacagaggacaaagtaggaacggaggtggtaagaacaaatccacatagatcagcaatcgcaaaacaagaaagaggcaaagatcactctcgccagaggtgaaacagttttattaaacttacaacagaattaccattagccttattgaccttcttcaatgtctgtttacagtatacacatcttaaagcacaagtgtaaggacagctgtaagggaaagggtacaaatgatccattagacaaatattaatcagacaaaactagtgtggccggataatgattaaaggatcaagtcaacagaaagacacaatattatttaacttacatacactgagcagcatagattcaaaatttattagagcaaaagttgctccaactacatgatgaaacagaaaatatatcaacaaattggataatttaacaactgctattattattgggtagatcaagtacaaaaaacaggcaatagataacttgatctaatggacgtacataggatgcaatgaataaatctgattcaatacaaaatgactggagaatacttattctttttaagctcacatgaacatttatgaatttgaccaatgtcttaaagccataggccattgggcaagtctcaacaaatttcagataattggtatcatttagaccacactctctgttcataatgggattgatctaaaaatcacaaactaaaagaaaacataaaactcccatacatgtggaaattaaaaactcactcctaagacaaaggtataaacaggcatttcacagaaaacaggcattgtcaagaaacatatgacagactctcaacatcattagaattatgaaatacaaatgacattcccagtgagatacctttttagtcccaacagattgacataaaaataagtctgacaatacgatgtgttcaggggaaagtaaaccttttcatacaccctatgggtgggaatatatattggtacaagcactttgggaacaaatcggcattatgtggcaaagtcgaggatatgcaaatctttcagccctccaattgcactcctgagaatttcacctttcagaatgtgcacccttcagaatttcttgcacacgtgcaccagggcacatgcacaagaagttcctcaaccacatcatttataatatcaaaaaagctggaaacaagccatctgtccatcagcaggaaaatggataaattatagcatcactatgaatgaatctcacattattttgagcaaataaagtaatgaaaaatccttggagtctttttttcattctactgaagtggttggctttttatttatttgcaagttttctttatattaataacatattgaaggttgccctcacccaaattactcttctcttattttacaatgtctttttctgtagaagtttaaaaaatattttatatattaatattttatattacaatatttatcaaaatgttaaaaatgatttttgtcataggtattattattcttagagctttctcagtccataagatttcattaatatttacttatcttttcttcctatacttgtagggtttctcttttccttccttccttccttctttccttctatccttccttttcttcttccttccttccttcctctgttcctctctccctcccaccctccctcccttcctttttctctccctccactgggccgcctgcagcggagcacccgaacttaactactcggccacggggccagccgctaaaaacaaatctttttatagaatattttttttttagtaaggagtaaaatacagatgcgaatcccttcctcctttctctaaaaacactacaggctgttctaatgacaagtctgtctattccacactggcatcaaactattttgtttcaaatgttttcgatttttatagctatatagtgtttcaaatatccggaagagcaaggtccccagctagtttttgtcaaaaattctttgtctattctcacattcatccttgcaaatcatttcttgaaatagtttgtcaaattaaatacatatttggggggatattttctttgagatggtgttatatttgtatgggaggggactattgatatttttattatattaatctttcctagaaaataagaagatattcttttttatgtatttaagtttactttcatgtcttttgagtaagatttacagatattttttcctctacggatacaacacattctcattaaatttatccccagatacttttaaacttttgctactattatgggtaagatactttcccactatattttcaaatattggctcttatgaaatatattggtacttatagttttattttcccaacctctcatcattttgaacatttctactatttctaatatattttcctttgattctcctgatgtcttatgattaaatcatgagtaaattgtaatctttatctcccatctagtccaatacttaacctaggaaaagcaaactaagctaacaaaacaatgattgaaccagtttcctctttgataaaaatgctatcttggggagaataggcattctgatgtttttctgccctctccttgaaataactatagtatttcaccattgtgttattgcctataggtttaaaatagcctattacgtttaagaagtattttttattttactaagaaatgatattgattgttatctattgaaatgactaaatgtttttcctttgacttaatatatctatctgcctatccatctatcatcatttatctctttctatatatctccgaatactgattatccttgagatcctgacataaagcctgttattcatggtatattactcttttcatatcctgctttatgcattttgctagatttttgtttagagttttgcatctatagcaataagtgaaactttttttttattttactttttgttctgtatatttcagggtagcttttggtgttcgaatagttttgtaaaaagaactggtaaagttcctttccttatctaggttctgaaactgtttaaatattaaaggaataaagtttttaaaaagttgttgaggaactaactggccccagagatacaattaaaatttttgctttgttttgtttttaaattttctcaatatctttatggtgcaacagtctgtttattgccaacctgatatcccttccttctcttataaccaccccttcacttatgtagataattctgagtttgcttagggttccaatgtgcccatcttaaaaaaaatttcacggtttcctttttagctatggatagccatgtctaatagtttggattcatgatatgtaagtagatgggtgaggctttctggaaacctattattttctcgatataaaagcaaattcactttacaatttcttttgctctgggccctctgtctttcctgcctagaacacaggctttattctgcaacagccattttgtgatgtggataaaagctacccacaaagatgaggggaaaaacacacatctgagtttcattacccatctcaagacttcttacagtgtggagaatataaatctctaataagttaaatctcaataatcaagtttctgatacacccaactgaatgcatttttaactgctaaaagttgttaatttatacaggttttcttccccttcttgagttaattttagtaacatatattccaagaagtcatacatttcagatacatttaaaaaatttacatatggatgttttcaaatttttttcattcctatattgtgctcaaaatctgtggttaaatctgtattttcattgccaactttttaatatttgtggtcttatttttccttgcatgcttctatctagttgtgtggctcttttatttttaagtgagtttggctttatttatattatttttatttatttatttatttacttatttatttttttgaggaagattagccctgagctaactactgccagtcctcctctttttgctgaggaagcctggcgctgagctatcatgcccatcttcctctactttctatgtgggacgcctaccacagcatggcgtgccaagcagtgccatgtccgcacccgggatccgaaccggcgaaccccaggccgctgagaagcggaaggtgcgaattaaccgctgcgccaccaggccggcccctggatttctttatattattaatcttttcatgctttctatttagtttttttgctgttgctttgttctgcttttgagttgaatagttagttcatttaatttaatttttagggataggtataagaacttcagctaaaagattttcatgtgtatacaatttgttctcactctcaatccttgcccatttcttatcagtaattttatttcttgaagattttgtaaatgtaatttcattactcctcttattttgttctagttttacaggaattttcaacattgttgttgttgtctacaattttgtgattattttctcatgttattgcctcaaggccagagggagtagataatctgatttcttctttggggcataaatgtgattgttttttcaagattacatgttttatttagtctatgtgttcttaaaaaaatgttctatattttgaaggttatatatttcaatttatatattatgaatcaatctttattatattattcagatagttttcatccctttcttcccacttatctacaagttaagatctactactaagttactgtcaatttctccttaaatttctaataatcttgttttatatatgtatcaagtaatcccaatgtttcagaagccagccttatagtttttctccaattcaatcaattgtttacttctgtcatgatagtgggaactaaattttagtccatttggagtttttggtttcctctttctgccacgttgcagttaaacccagggtacaaacatgacatgagaaaatcacccctgtcccttcagggaaggaggaggggaaggcttcttagcatctcttacctgtccataagggctttcatccacatgtgccttggtccttggaccatgatggctgctactgagaagcccatcattcctgtccgtgtggtcttttcacgtctggcccttctctccattcctttggccatatttggaaccagggatttgctcagttgcttctggccactctgcaccaggggaatcattaaggggatggtgtaaaacctatataggtgaacatccacacagctctgggggttttcagctcccccaggctccagccagggagtacagcaaggtctcctttcctctgagctcacaaccctgcatgaagttcttctctgactgcagcctggggaccctctcccctagactcctcaacggcagaattctcatcacactgttaatgttatagcacctctatcccagccagcccaggccgagggaatcgtttctatttcagtgaggacagagacatcttctctcttctaggcatcctctctgatttcctaatgacatcagttttggggcaacaagcgaagaagcagctctctttctctcttttaacctgttatatcgctttgttttgtttacccaagtgttgttaaaatgcacctctaaaaacagagtctggaggctaggttgcaaagggaagaatttttacttttgtgtgtgtttgcatgtgtgtgtgtgtgtgcgtgtgcatgcatgtgtgttttcttcctatacagttgttgacacttttgtgctaggcttaactttgggcatctgattttcagtgttctgcatctctgttacaggaaagcatataataggcctcctttctgtagtttttgcttttggagtttgagtaagcctctttgaaagagtctacaatatattcaaaaaggctgttttctgttgtggatggaaaaacaggctaggagaaaaaaactctcttctgcctgtagctctcctctttggcatggtgataagcgtctcccttggcatcttggtccgtagtggctgaaggcttccaagcatcttctgtagtagacgctgtggggcacagcctagattcctgttaggactgaggtacttgtaccccagctcgtggtgcattccttgttgcaggctcacagcagaggcctcccctaggcattgcactagaccaaaagcagccatctctgttatagttacactgctccccaaggacagcccctactcaaagtctggtctgtgatttctgaagggtcattccagcttccaagctttgcatggcataggctgaaatcttcgttgcagctacactggatttcaacttcttccacccagtcttactgccctcatttccccacagggcattccctagtgcaggcaaatcgctatttgatagcctgtttcctggagtgcccgacctaagaaaccatctctgatggacttctacactttcaaaattcacactccccaaattttattttttttaatttatttatttattaatttttttttaagattttatttttttcctttttctccccaaagccctccagtacatagttgtatattcttcgttgtgggtccttctagttgtggcatgtgggacgctgcctcagcatggtttgatgagcagtgccatgtctgcgcccaggattcgaaccaatgaaactctgggccacctgcagcggagcgcacaaacttaaccactcggccacggagccagcccctccaaattttagttataattgtaatgatcttcaagatctagtgagatattcttatgtgtttgagtttgcttaacattatcttattttgtccttaccactccatggggtaggcactattattattcccattttacagatgaggaaatggagactgacagaggataaatagcttgtccattttcacccactacatccaggctagtcttcttttgagacatgagtaaagagacaagaaatgcagctcccaggtcttctttgctcaaatatctcaagagggccacaagatgctgtatctgattatgtttaatctactgcaaataaaagaaccttaaatagagatcctcattactcatgcagaaaactcttcactgtaaaccttctttctgaaaagggatggctatgatgttatgccagaattttttaatacttcctgccattctgcatcattttcttggacagagtagtgtgagtctgtctttcaatctgtctccatctgtaatatactagtcaaaattccttgacatttgtgtctgagtctgttccttcatttcactgccgattaaaatgtcccctacctttattgtctttgatctttttgtttggtttcttaagagggcaatagaaggtttgaagctagcatttaagctgtcatattttctaagttacctggcttttgttgtgtaatgctatcttgcaagcattttttcatgtcattagctattatttgaaaatgaaatgtctatactaattaattaatctccccctattgatagaccaagggttgtgaccttcctttttaccattttaataatgatatggtgcacatacttacagatatttaattctcatctctttaatttctacttaggttaggatcctagaaatgggataactgcatcaaaagttatgaattctttgacccctttgataaataatgttaaatttcttttcagagttatttttgccaatttaaattcatttctaacatcaatatatataaacaactctgctaggaaaaatatgtcaatttgatacgttcaaatgtaacattttaaaatttccgtttagtatttgatttttcttattggccttttatggatttttttacattaagaatatttacctttcatgtgtctttttttttttgcagggaaggattcaccctgagctaacatctgttgccgatcttcctcttttgttttttctccccaaagccccccagtgcatggtggtatgtcctacttgtaagtccttctagttcttctatgtgagccaccaccacagcatggctactgacagatgagtggtgtggttccccaaccaggaagagaacctgggctgctgaagcagtgagagcacagaacttgaaccactaggccatcagagctggctcttaagtgtcattcttgtgttgaatgtgtttcccattttgcagtttgcctttggtgtgcactttgctgagaatctctatatctgtcttatttcactgatccagctttagttcttgtgaaatactctactttttggatccttataacttcagaggacattttaatatctgggaggtaaattgtcactcaccttcttaatcaaattacttataataattttctatggtttaaatttccaggtaagcttcaaattattatcatttggcaaagtatatgataaccaaattaagatttaaatgttattatatctataaacatgtgcaccatataattaataaaataaaaaaagaaatgggcacaaccttgcatccatcaataggggatgttaattaattaatgaattaattaattagttaattcatatattaatacaatgggggcatattaattaatgtatgaagagattatttaagaggtacactaaaaataatgaatatgaggtatttataggccagtgaagataccaccttatgagcaggtggctcatactggtagagcataagggattagatgggaagggtaagtatggattacgaatttcctagaaagacagaaaggaagttatggtttgatttgaagattatgggaagccatcaaggactttgaacagtgacggatgtgttgaaattagcatttaataatgataaaagccagcattgattatgtctctgtttataagccaggaattctttcaactgctttataatccattcagctcatgcaaaaactccatgcagtcactgttactcttatcccattctacagatgggaaaatggagacacagtgggatcaaggaattttttcaaagttgcagagctaaaaagtgcctacatccctacagagttcatactcttcactgctaatttacacctgcaataggacagactcattctcttcttgttcatcactccccaccaaatccaaagaataacaacaaacaccaaacaatctgttataagattttttccaagacttttttttcaagatcatttgctcccatgcccccaaaaatttccatggaagagcaaagacagccttggtgttaaagctcatttaacaaatcatcaatgtcatagaagcttgcaatgtcatagctatcttaaaaaaaaaaaaaaatgaaaaaacagaccacactgtctgattctgcctgatgcagaggtagggctttctgactctgtactcagtgctcaagttaaagcattccatgtgtaatttctacgtggtaactcttgtttcttagaaaacaaatgtgtatttataaagaaagctctaagaacaggcactatgggatctttaaagtgatgtttctgaaaatttctgccctgtcatgactgcttttggaggagttctattttttatattttatataatttatatattaatatttaaacatgctggctgtttgtctaagtgaaatctctcaatagacaaataatgctctgaaaatgtgttgactaaaagaaatttccaggaaaaaaatagctactgttgaaatcatcatgaaactgctaataattgagaaggggaggcaagttcaaccttacaacaataggtttctaaatccatattctgcgtaattgatgatcctgatttttgttttgagtagaaatcagaataaaacaaaattgctcaaatctcaatgatcaataaatagctagtggtcataaaacagcgcaaatgaggtccactcaagagagccatactacactgtgcatcagcccaataataagatatgaaaatgataggttccagagggatttacaaattagaataggtatttctagttatggaagaggttggtgtgagaaagttttgtgaaacttatctggagagcataacagaaaaaatctttgaaattgaggggtcccacagcatttacaaaaagctttcagcattatttttccaattccattggtcatgctcttagaatcgctgtccacttctttttcagttctgaccttgatgcagcagccatcacctgtcgtttcctcaatgccctgcagatgcattcttcagatctttttccattatcagtctcatccatgatcaaaacacctgattgccacctcgactctatagagagactttctccttcctctttcttctataaaatatccagcaaacaactgctgatattaactcatttgtctatttagctatctgtccacctgtccagttgagaactatgtagaggcagctatagcatcgagagcacagacttggaagtcagactgctttggtctgtatcctggttctctcacttattatccccataagcttgacaatttatttagcctatttattcttcagttccctcattactagaatgtaaaaataaaaaacccaccttcaaggagttgttttgagaataaaaggggaaaatttataacaatggtgttaagtgcttcaaaagagaggtaaatggtcccttgatagcttcaaacatagatttgacctagtcaggtaagtcagaggaggatgtcatgggatgtgctgtttaagaggaaaggcaaagaatgagttcatattaacttggtcaaaaaggagagaacattacaaacacacggcatgtgttcagaagaatcaggatgagtacaaacagatggaaggtcagtgagtctagtgcaaagagagcaaggtgaggctggaaagatagatggaggagagctgataaagtgcttcacaggacaatttattgaagttgtaagcagctggccacattatcatatttaatgtgacaagatattggattgcagaggggccagcctggctgacagtagacacactaggttatgttaataaaataattcaggagaaagacaatgggagcttgcattacgattgcattaggattgtggtgatagagatggagagaagtggatggatttaagagatatctaggaggtaaaattgccagagcttggaatgaattgtgttgcaggagggaaggcgaggaagagggagcagttatggatgactcctgcctcatggaactaagaggtgactcaaaggatggaaggtcacgtgtgtgatttgggacattttgtatttgaggtcctctaaaggtcaaaatcttaaggagtcttcactgtttttgaagacttcatgatcaaatttagacttttaaggccagaattcaatgatctttaccgagtccaaacgtttctactctcccccactctaaggttttttcccaagctaatatcatcactatctttgaacattcaacttgtcctctcctcttcttcccacctatttttatttcctttcctttttttttttctgctttatctccccaaaccccctctacacagttgtatatcttagttgcacgtccttctagttgtgggatgtgggacgccgcctcaacgtggcctgacgagcggtgccatgtccgcgcccaggatccgaaccctgggccgccacagcggagtgcgcgaacttaaccactcagccatggagccagccgctcctttcctttttagagttgttaaaaattaatctttttcaagtagcctttcatgagaagtacatccgatgacaataaaagtctacttttacttccatccctatgcccagcaccataatgcttctttgcatgataatttgtacttactaatacatgactttataaaatcattctttccttattttatgtgcatattttccgtctatgtatactgaatattgcctcagatcatggaccaaatcttctatttttctctatttgccctttatttcttagaacaatttgcaaaattactagaacaaaaaaatactttgttgactgaccaaatttcccaagctgggtgggaggtggtaggaaaatggctgactaatgcacgatttgttcattgtctcaaagccacagaaatctttcatcacagttccatttccaattttgttccttcatatccctctgaatggatggaattctttcagaaatgccaaaatgtaacaagccaatgtggtttagtagaacaagcatgaatgttgggcttaaacagcaggttttatttatccctaactgtgtgaccttggacatttcacaaaacgtctctgagtctgaatctcctcattttaaaaatgaaaatattaatatctaatctatatactcattcacagtcttatttgtcccttcagatcctagcttcattatatttccacgtataagctagtaacctgcacaaatacattcacaatcttaatatgcatttcctattgaacttgatgtttccttacatcagaattctaaacatggtttaacttgaagatgttgagaactaatgccaaaacataataactatttcaaaaccttctctaaaggtcaaatagtttcaatgccaaaatattctagaactgcaaagtgacaaatgcattagaacacccacagagaaacctgttttcactttggagtaaatatttttttctcatgaaaagattgttgcattgaatggtagaaaactgccaaaatttagaggaagttaagcaatatcagtatgaaattaaaaataaattagtcatagctgtgatcaagggaatttccaagctgcatttgagaagatcagaaagttaacattaaactgccactgaaaagcaaaacctactcatatcattttaaataggagcttaaaattcagtgaagatatggaatgatgtttactcttttttagtatgttccttcaatctataccaaattcaccgatctataaatcagaatatcctgtattcaggttacagaatcatcaacactggaaagtctagaatatttgaaagtgaatatattgcctaggttttaatgttttactgacaaggcaataaaatgatccaaacaagatttctttaaccctacaagtagcagtttccccacgtattaatattgtattaatcttgttttcagaatgtactttatagccctaaggaaactttaaaggtcgagaattggattttaacttggaaaaacagctgaaacttatcacttgggcaaattctgttgaaatgcaagagattgtaaaaaagttcctctcgtggagttttctctaatatccactgaagtaggtttgcgcttttatctggagaggaaagttggcaggcatcctaaccccatagttatcaacaatgctggttgagcctcccttcttggctgccaaactccttcaaagccacatcaccttggggcgtgtcctgggaaggtagatcattgcgtttctagagctgccccagcccctcaaggcaatactgctggatgtgaattgtcagatttggctccttcttccttgtcttcctctgaacctcgctactgtgcagtgctgcctgcacttcttttcaccttttgggaaccctccccaggaagttgctgtctactgactgctactagaaacaccacggggtcactgtcaagatctcagggttgatggccgattgtctcaattcgaattctggctccaccgtcttcttttgttggaatcttaggaaacttacttactcaaatccagactcagtttacacatctgttaaaaatgcaagtgacagtaagaattcctaaattgcagggctattgagtaaagaagtcagtttaatgtaagctcaatccatagtaaatgactgatatttactgagtgtccctgttatcttgaccttgttacttacctcctcctccaaatgtccccatattggatatcatttcactcagatctctcagcctaataaaataattgaatctaagctatcgtcatgtttcctttaacattttcacttgaaaactcctccccagctcaaaagtaacctgctaggccaggcctcctcaaaccaatttaggaacgcgtctgccctaatctcattattcttcatcaaccattggctatgctgtgtttatcatggagcactaatacttgtctttctcccacagaactaatgacccaaaggcaaggagtttgacttcagctctatcttcagggctaaaacaaaacagtcaatactacgtgttaattaaagaaatgaatatgataatagattagtagctaaagacattggtatgatttcacattttagtgaaatcacatcaaagtgttaactcaaacagttgagaattatcatatagattttagagctggttgggtgatatttgggggtagggccatgattctaaaagccaacaaatcagaggagaagggggtggagcaaaatggcggggtgagctgacccgggattctctcccctccaaaatacagcaaaagattggaagaactgaatttcagagaataaacataatgccagctcattagagacctacaataccaagaaggcggagatcataaaccttgcttacaccctcgggggcactggaacggtaggagagaacatcgctccctcccctagagtctgcgatcgctgccgcgcgggttgggaaggagcgggggaggggccatgcgaccgggggatcatccaggactcctgccgctgattcagtggagacccgctgacaggggaaagcttccgtccacggggaccctataaatcaagggccttgggagaccagagaacagaactgatctgaacccagaccagtgcgtgtgagtaacagcccctcccccccagcaaagccagtgggcgcagccatcttgccccaaggcggagagctcataacatgcggctcttgacccccatctagtggcgacaggctgtaactgcaactgaattctaccaccatgcgaaaaaaccgctcctctaccatccagcaatttataaaagccccagaccagaaggaaaacaataaaaacatagaattaagtcctgaggacttggaagtaggtaaactaagtgataatgagttcagagcagctataatcaaaaaactcaatgaggtagagagaaagacagagaaacaagccaagttctggagttacttcacaaaagagattgaaatcataaagaagaatcaaacagaattacttgagatgaaagacacaatggaccagataaaacagaatacagattccctgaatgcccgtgtagacaacatagaggagaaaattagcataatcgaagatagacaggctgaatggcgccagacagaggaagaaagagaactaagaattaaaaaaaatgaggaaaatctccaagagataatggattcaatgaggagtaagaacataaggatcataggaattcccgagaatatggaaaagggaaatggagcagaaagtgtacttaacgaaattattgacgagaacttcccaaatctagggattgacggagaaatgtgtgtagaggagggttttagatctcttagatttgtcaatgtaaaaagacctactgcaaggcacatagtagtaaagttggcaaaaagggaatataaggaaagaatactcagggaagtaagaaaaaaaagagaataacctataaaggagcctctatcagactgtcagcggatttctctacagaaaccctacaagctaggagagaatggagtgacatattcaaagctttaaaggataaaaatcttcagccaagaatactctatctagcaaaaatttccttcagatatgagggagaaattaaatcttttccagacaaacaaaagttaagggaatttgtaaccaaaagccctccattacaagaaatcctcaagaaggctctcatacctgaaaaaagaaaaaagggagaaaggggacacaatccacagactagggagatcaatggatagaaccagaacaggatagcaaatattcaactatagcattagggtaaaggtaaggaaactaccaaaacaaggacgatcttagcactctaactaccaattaataagacgagttggaatgaaaaaatgaaaataattatttaggaggggaagagcaaagggtctaaatcagtattggtcaagtaggtaagagaccaccagaaaatagactacattatacaccagattctaaatacaaacttcaaggtagacactaaaataaagtacagaacagagtcacaaatcataaataaggaaaaatctaagaaacccagcataagaaattgcagtattaaatgggtagtctaaagcaaacaggaaaagaaacgcaggaaaacaagataatgagcgacagattaacagcactaagtccacatgcatcaataatcactctcaatgtgaacggattgaactctccaataaaaagacacagagtggcaaaatggattaaagaacatgatccaacaatttgttgcctccaggaaacacacctcagccccaaggacaaacacagactcagggtgaaggggtggaggacaatacttcaagcaaatagcaaggaaaaaaaggcaggtgttgcaattctcatattagaccaagtggatttcaaaataagacaggtaaagagagacacagagggacaatatagaatgatcaaagggagacttcatcaagaagaaataacacttataaatatctatgcacccaacacaggagcaccaagattcataaagcaactattaacagacctaaaggaagatgttaaaaacaacacaataatagtaggggacctcaacaccccactcacatcaatggacagatcatccagacagaaaatcaacaaggaaatagtggagctaaatgaaaaactaaaacaattggacttaatagacatatatagatcacttcaccctgaaagagctgaatacacattcttctcaagtgcacatggaacattctctaggatagaccatatgttgggaaacaaggcaagcctctacaaatttaaaaaaattgaaataataacaagcatcttctcagatcatagtgctataaggctagaaattaattgcaagaaaaaagctgagaaaggcacaaagatgtggagactaaacaacacactactgaacaagcaatggatcattgaacaaattaaagaagaaataaaaaaatacctggaaacaaatgaaaatgatagcatgccataccaactcatatgagatacagcaaaagctgtagtaagaggaaaattcatcgcaatacaggcacatcttaacaaataagaaaaatcccaaataagtaaccttaaagcacacctaattgaactaaagaaaaaacaacaaatgaagcccaaagtcagcagaaggagagaaataataaaaatcagagcagaaataaatactattgaaacgaaaaaggcagtagaaaggatcaatgagacaaagagctggttttttaagaagataaataaaattgacaaaccactagccagacttacaaagaaaacaagggagaaagctcaaataaacaaaatcagaaatgagtgaggagaaataacaacagactctgcagaaatacaacagattataagagaacactacaaaaaactatatgccaacagaatggatagcctagaggaaatggactcctacaatctcccaaagctcactcaagaagaggcagacaatttgaacagaccaatcacaaggaaagagattgaaacagcaatcaaaaacatcccaaagaataaaaccccaggaccagatggctttcctggggaattctaccaaactttcagagaggatttaatacctatccttttcaagctattccaaaaaattagggaagatggaacacttcctaacacattctatgaggccaacatcacgctgataccaaatcctgacaaggacaccacgaaaaaagagaactacaggccagtatcactgatgaacatagatgcaaaaattctaaacaaaattttggcaaccagaattcagcaattcatcaaaagaatcatacatcaggatcaggtgggattcataccagggacacagggatggttcaacatccgcaaatcaatcactgtgatacaccacatcaacaaactgaggaataaaaaccacatgatcatctcaatagatgcagagaaggcatttgacaagatccaacagccatttatgataaaaactctgaacaaaatgggcatagaaggaaactacctcaacgtaataaaggccatatacgacaaacccatagccaacatcatactcaatgggcaaaaactgaacgccatccccctgaaaacaggaatgagacaaggatgccctctatcaccactcttatttaacatagtactggaggtcctggccagagcaatcaggcaagaaaaaggaataaaaggaatccaaatagggagggaagaagtgaaactctcactgtttgcagatgacatgatcttatatatagaaaaccccaaagaatccattggaaaactgttagaagtcaacaactatagcaaagttgcagggtataaaatcaatttgcataaatcagtagcatttctatactccagtaatgaaccaacagaaaaagatctcaagaatacattgcaacaaaaagaataaaataccttggggtaaatttaactaaggaagtgaaggacctatataatgaaaattacaaggcctttctgagagaattggatgacgacataaggagatggaaagacattccatgtacatggattggaagaataaacatagttaaaatgtcccttctacctaaagcaatctacagattcaacaccatcccaatcagaatcccaatgacattctttacagaattagagcaaagaatcctaaaattcatctggggcaacaaaagaccccgaatttctaaagcaatcctgagaaaaaagaacaaaacgggaggcatcacaatccctgacttcaaaacatactacaaagatacagtaatcaaaacagcatggtactggtacaaaaacaggtgcacagatcaatggaacagaactgaaagcccagaaataagaccacacatctatggacagcttatctttgacaaaggagctgagggcatacaatggagaaaagaaagtcttttcaacaaatggtgctgggaaaactggaaagccacatgtaaaagaatgaaaattgaccattctttttcaccattcaccaaaataaactcaaaatggatcaaagacctaaaggtgagacctgaaaccataaggcttctggaagaaaacgtaggcagtacactctttgacatcagtattaaaaggatctttttggacaccatgccttctcagagaagggaaacaatagaaagaataaacaaatgggacttcatcagattaaagagcttcttcaaggcaaatgaaaacaggattgaaacaaaaaaacaacccactaactgggaaaaaatatttgcaagtcatatatctggcaaaggcttaatatctataatatataaagaactctcacaactcaacaacaaaacatcaaacaacccaatcaaaaaatgggctggagacatgaacagacatttctccaaagaagatatactgatggccaataggcacatgaaaagatgctcatcatcgctgatcatcagggaaatgcaaatcaaaactacactaagatatcaccttacacccgttagaatgacaaaactatctaaaactaatagcaacaaatgttggagaggttgcggagaaaaaggaaccctcatacactgctggtgggaatgcaaactggtgcagccactatggaaaacagtatggagattcctcaaaaaattaaaaatagaactaccatacgatccagccatcccactactgggtatttatccaaagagcttgaagtcagcaatcccaaaagtcctatgcaccccaatgtttattgcagcactgtttacaatagccacaacgtggaagcaacctaagtgtccagcaacagatgaatgggtaaagaagatgtggtacatatatacaatggaatactactcagctgcaaaacagaacaaaatcattccatttgcaataacatggatggaccttgagagaattatgttaagtgaaataagccagcaagagaaggataatctgtgtatgactccactcatataaggaatttaaaattatggactaagaacagtttagtggataccaggggagaggtggggtggggggtgggcacaaagggtgaagtggtgcacctacaacatgactgacaaacattaatgtacaactgaaatttcacaagattgtaacctatcaataactcaataaaaaaattaaaaaaattaaaagccaacaaatcatataatgttgtctccctacctaaatatcctttcataagactcgatgataacgggtagctttcaggcatttgagattctttgagagaaccagttaccattcctcttcctcatcttcaagaaatgggacaaaggagtgaggcagctggagcccacagtattttttacaggagaatctgatattaaagactgtgtttaatatctgtgggctagtggacttcttaatactgagctccagaagcggacagaccatgcatcttgccacagacatcattttccgttttaggattgtgaggtagtcttaattacttgctgtcttagttactgtgtatctgaaaacataatagcttctcaaaaactaaatatttggtcactggatcaagaatgaatgaagttagctataatgccaggtatggagagattctatcagtcaaaaggagaattaccatttgaaggaggaaagaagagaaaagaggtggtgactggagaaggaattgaaacctcctccttctcttccatccttaatgggaatcactaaatgctgttttatgctaatagacgactcagcaaagagggagaagtttaacatacaagaagtagaggaataactaaagagataaaatcttggagaagacgacagaaaagttgatgggaagctgagcatccgagggattggtctttgaaagatggaaggacatttccttcattgaaatgggaggaagaaggaaagtggggggtggggaaagtcaaggatggtttagatgacagtttggaggacttcttttctgattgcttctgttttcaccataaagcaggagaggaagttttcaatggggaactgggtgaaaaagaggggtattgaggagaggaagtgggagattttaagggaaagaagaagatatgaaatattctgaattattggagaaaaatgagagtacaagagaaatataataggttgcagggcagatttgaagatttcactaagaactggtgaatttctcagcaacagatccacatacctagaaaattaataaaacttagctttctaattacgctagtaattgtatctttttaaaaattaattgcaagctttgatttttactgacacgtataatccatactttgagtagaccaagtcaaagggcaaagagaaacaattcaggagtacactaatatcacttttaacttacagagatttcagggcacatccagaaaagactttcagggtatttgtaagatgtctgaaaatttttgagtaaaatgtcaaacttttcaatgtctaaaaaaccaaacaaacaaacagaaagagaattgaggtcatgaatttaaaatgaagctcacctctctggcctgtaagaagttggcatcaggtaccaaagctcttcaatggctacagatgcaggtcagcgagagatctttaccttagaattcaggaattcactggcaactactgtgggtatttgcaatattttagaagatctgcacctaaggaataaacattatagggcagctaaggaagtgttcacagactcttctctctcttttttggccctagccttgtgcaggattacatgctctttcatcagtattattacataggtctccagacttcaaagtgaaacgtctccaaacgagtctacttgaaatcattcaatgactttccattgaactcaaaagaaagatgaaaagccacgccatagacttaaggttctgaatatctagcttctgcctctttttccacactcaactcataccacctaatcctcacgctaccacagtggccttttctcagagccttcaacaagccgtgctctctagtggtcccagggcctttgcctagttggattattcagagttctccagaggaacagaaccaatagggtgtgtgtgtgtgtgtgtgtgtgtgtatgtgtagagggagatttattttaaggagttagctcatgtgattgtgggggctagaatgtctatactctgtagggcataatgctcatccacatcatggaaggtaacctgctttattcaaaatctactgatttaaatgttaatctcatctaaaaaatagcttcagagtaacatttagacaggtgtttggccaaaaactgggtgctatgtcctagccaagctgacttataaaatcaactgtcttacacatgctgccatctgtgcccacgatgctctttctctccccttcctcttgggtaaattgtcacttttctgatcaacctttcctgatcgtctcttcccttctcaagactaggttatatccctcctttgtatgctccaagagaaccctgcatttctccatcacagtcatgatttaattgacaatcacgtacttgattcatgtgtgactctgtcttctcctgaggacagaagccatatctaattgttcaccactgtgttcactggtcccaggcactgtcttgcacaaagtggatgctcaatcaaaaccaatgaattagtgaacattctttatgaatacaggaaatctccatatgttcactaagtggtatttataaccatcattgccttgtttcaattgtttcatctatgataatcataaataatagagtaaaacatttatagagtacttccaataagacaggcatgcttctgggcactcaatattaactgattctagcagatacctcttttgtaccattccagatcccttcagcctcgttgtctctgaggctcttggccacaccttttgctccaaccctagtccctgcaaaatcaatttctctgcagcaaactgagctacaccttgcatcatgcctgctgttacatttctcccctccagctccagggtttctttctctgtggctgctgagatataatcttttcaggacccatgatgctcactggaaatgtgggggagataaagtactgaggagcaaaactttgaccaacagaaggagacagaagataaagtcttctcatctccccaaccccaccatccacagactgtcctgagacacaatagttcacagggccccttgggagatggtcccaggagaccgagcagtcaatcatcatgatacctgggactggccagcagtcagttatatatctcctcctatttcctctctctcctttcctgcttcactcttcttttctcttaccctggctttcctggcattgaactcttcaatatagtcttagtgtgttaccttttgccttaggctctattttccagagcacctgggcttagacattcattccatcctcacaacaggaggagaacatccagtttgtgttttaaatgttcatcttggctgtggtgtgctgatagaaggaggagaggagaggaagtggagaacctacttaggaatttatggcaatggtcgcagtgaaaggcggtggtctggaaaagaatgccagctgtagaaatggaaaaaagtgaacatgtttgagatctagcttcctcttccctcctaggccttttcatgtgcactgccattgtttgtttacacacctgcctattcaactctgagtgtttcatctacaggaattgctggcatatttcagaaatttagtataattctgttgtatgaatgaggtggaatgacaattctagacatttagaaaaccataccagtaggatggtccgaaggttacaatggactaactgtaggaagagatatatccgtagatagatagatagatagataggtagacagagagaaagatatcaccatgttttgagatgaaaaggaggtgctatttattattatgccaggacaacaacagaaataaatcagggctgtctcaggcaaaatatgaagtatccttacactaagtatatagccacactaagtatatatccactgcatatagcttagtatcaacttaaaagtatagcagtccaataattctttccacttaccaaagtatacctttaacataatctgtcttggcaagagtttattagctattagttttcatcactgaatacaaaataatatgagatttctactaagtgattctccatcagaagaggaaaacgtggacgtaatcaggaaagaatcgctttgtaagccctcctggctaacgtcagtaaatcagaaagcagtggagacttagctttttaagagctcctgagccagagagaacctgactttcaaatctccttctccacttactttttacttaaccatttaagccttaatttctgtttcatgaaaactagcataatattctaatagttacaaaatttttggctgtgaaagagaatttactccttgttttagccaaaaacacaacagcaaagtgatttattgattcatttattctttcattcaacaaataattgctgagtgcccactatgcgacaggcatgctgcgatgtcgcagtgaaaaagcaggcaaacccactgcttatgtgaagcttgtacccctgtggaagaggcagagaggttacctgtaaaaaccagctatattacataatggcagatgaggttgaattcaggggggaaagttgggtggatgaaagggggcgagaataacaggaagcacttctttagaggagcggcaggcagggtttctgtgaggagttggcacttgagcagagacatgaagaaagagaaggagggagtaataagaatagctgtgtgtgtgtgtcggggggggggggggtagcattccagggagagggaacaacaaatgcaatggcctgagtgagaattagcttggcttcttcaaggcaaattaggagctgcaaaggagtcagcaagggggaaaggagcatgagatgattggggagaacgactaactgagaagtccaggagtaggaatgcttcaggaaaaactggttcagagttgaagcgcaagtttgatgctactcaaacttgttttctctccctctgtctcttggctctacctcctcctttctagttccattctcacgcaagcttcttcctcatggtgtccagatatttccacagctccaggcatcctggattggaaagagagtggaaagagagtcatcctctttctagcagctcctgaagaacccctagattctctgtaaattgaccaacttatagctacacctatccctacaaaaagtacaggaccagcaatttggttctgcagcctggactttggccgtgcaacctattacatctgggactagggattggactaagaatacggtggggatgtccaagcagaatagggcagtgatgctgaaacagaaaatccagagctgtaagtggacatagggtgaatggatgctggatggagaaaaatccgctacaaagagggaacatgatagtgtccatcatcctcatcatcactattactgtttaccaatgatagagaaaggcattgtaattaagattctgtatcacatccttttgtgtttatttttactttaggttaacaacttagcaaacactttccatgtagttctttttaaaacatggattcagttcttcaaaatgaatcttttttaaaaaaataatttttaatctttgtaaagttacaaattaaagaatcctgtcctatattgccagctagaaccagatggatccactcaatgattgtagataggattctggcagccatatttgacagatttcagcagctcccactgattacagaggggacatccaggctgaccttacctctgtaagagcatgtgacatactacagtggcctatgatagaaggtggtgagcatggacttaatattttttctcttgataaaaaaggaaaaacatgttatgatatagctaatcaagttaaccagataaaaatagtttttaaactgtcaagtaggtactgccaacgtttaattaaagatgaaaatttgcccacaggccttaaagtctgggagaccattgacatttttagtgcctgatttagttgactatttagacatactatgggaaaaatatcaaccacacaattctattacgtaaaacctgaaatattagagttgtatcctgtttacgaatttagccctccctaaattgtgctaagcctggttttcagataaagttagcatattttcagctttataatattcacgtatgtgtaaggtttaccaacattaaaaataaaacatgtttattgctctcaaaataattaaaatgctttacccttcaataagcacgtactagaagcagtggaaacattttaaaacgtgtttatcattttgaaaattggcttttatacaatggtttggctcaaaaaccacattttcagatttcagtttcaaagtggttatttgtgctcatgcatttacgtcttctcgcaccccaaatatgattgaaattatacaaggagtctaaaaataaaagtatatctatcatggcattggaaacacaggatttccatcaaagatcaagaatctttgaaagaatgttggaaaatatcaagcatatggaggcaaaggagacatctgcctattaggtaggtggatagcttttctcactggaagactgggaaaataaaaatctaagcttgggataataaggattggaggtgagagttaactagctagatagtctggaggtgagtactataggtcaaagttctttatactcaagtgactagccatagcagatttcctcaaacttctgttgatatacaacaaacacatagaaacaacaaccaccgcttgcaatagtaagggattttccttaaggcttagcttcattgtaacttttacctttccatttgaaaatgcaattcagaacaaattcttcgctactttacaggctagagtggaccagaaatcagtcacctactttaatagctggacaggacctgccaggaaagaagaaacgtatccctccctatgccttgtggccatctggatccccaggctagcacaatcaaaccacagaaaatataaacgttctcttcctctttcacagaggatggaaacttaaacacaatctctgaaaaacaaaccacaagtcctattactaagcaaacatagtcctcttgtttatgaatatatagacaaaaattaccaggcatatgaagagactcactagtccaaaggaagatagtgctgaagaatcagtacaaatgcaatcctgtgaattggacttaagtcatgaaacaggaaagaaaaaacaaaagttcttccaccttttattcacaacaagatttgagaaacattgtatgtacaaaacatggaataatctgagattaggaacttgtgttcctaaggaaaacatcattaccaaatttttaaagcaaaccacagacaaatgaggacatgtactgttagtgacaatctcaattagtgacttagaaaatcagctaaataaattgtcccagaagtaattaaagatgataagggaggaaagataagttactaatgatagagctcaaagaaagccaacacacttataacacaaatgccagagtaaaaacagagtgaatggaagagaaataaaaatcaaagaagtaacagaagaaaacttttctgagaggaagaaaggctataatggtaagatttaaagggactattgaatacaaaataaattaatggagaacaaaagaaaaatatatatatgtttgtatttttctttataatttcggagataaatatcaaattcaacaagcatccattgttgagaagaggaagacatgatattacctacagaagagataattacctctcttttaagacaagcaaggagacgatgaagcaatattgacagagattttagaaagaatgtttgtaacctcccaattctacttattcaaaaagataatgcttagttatgtggccagaacttgtatgtagtatcgaatttccattctcttcttcagttttaatcaggcacatttctcaatttttcttgcaattgtgtaggtccatattttcttcctatttgtttactgagatgtgacaggaagtgggtaaacttccaggaatcctccttaaaagggaggagcaacatcattttctcatctctcccttcctccattcttctgctgtggaagtgcatgtaatgactggcacttgagcaaccatcttggatcatgaaaatgttgtatgctccaggagtcgcaaagtataaagcctggatcagcaacaaaattcatggagcaatgagattaggtctggacttcctatgcccagacctcttttatgtgatagagaaataaacttcaatgtattttaagccatttctcatttaggtttttctcttagttgtagccaaacttgatcttaaccagtaagatataaaaagggggaaaatattcacatacttgtaaggattagtaaaataaagaatctgaatatctttcctgagaaaattttgttagaaaactacccaagtctgagaaatgaataaaaattatctcaagtatgggcaaacaggttgtaagagaagtggccgtaggcacagtaaaacttgagagttgatttctaaacaattgttaaaatggatataatgcagatgttaaatgcataatgtaacaattaaattaatgctaataatctggttgtaaaagtcaagattattttgcatagtgtgagaattgtgggatgtggaagagaggaaacagtatacaagctgctcatctaatgagactgaataagtgattcattctagaatgaatcattacattggaagagaaatagaggctcacacttttaaatacatagacatctagtactagaataaaaaataagtaagctttatacctttggagacaatataaagcaatgagaacactggaaatatagaaaagaaaagagaaaacaaccaggcagtataaacagccagaagtctattataaggtgatagaagacttcattagtcaggattatttgaggtgcaagtgagactaatttggctccaagatcagaagttaagatttgtttaagcaaaagtgcagaattgacaacctcattcttctgaaaagctcaggagtccaaacatccctggtgcctgttctcaaactaggaatctcctccctttcatcttttctgttgtggtagctgttaggggaagttgctgtcagcccggattcctaagtgatgacgtgaacagtatccccttggtgtcccaaactaagcctctcatatgagcaaggaaagattttctggtgtcaatttaataggatttgtggttgttttcttactgaaatatacagaacctagactattcttgctggcactattaataataattcaacaattcatgtgaacagataaaaataatatgatgattttaataaatattgaaaaatgtaatagaaaaattcaacatcaacacctgatagcttacagtaaaatatgaattgaaagatacttctgtaacatgataaagaaactaacaaaagctaacagcacatgtatagataatatgaattagttgttgaaaattattattttttccaatactatttaatatttttctgaaagtattggttagaacagtcagaatagataaaacaagaagtaaagatatttgtaaggagatgatattattatttacaagtgagatattgtctacctggaaagtattagaaaattcattgaaaaagttttataagtgtatgataatttagaaaaatgactgagttaaaaaaatacaaactttaatagttttcttattatacacctaaaagttaatagacaactaaaatgtctatgactggacttcaagagatctccgagtctctgaaattatgtgcaaaattgtatgaggacattttactcagataagtttccagagatttgatcagatcttcaaggagtctgtcagtcaaaacaattaaagacacagcaaaatagcaactgcgatcagcaggagacaaaatagagggaaaagtagaaaaaaacccctcaaaattacttgttttcagactctatttgaatacaaacaaagagttctagaatcctacataaacctaaaaaagataggtatacataaatgcatggatccattatgtcattataacggagaatcaatattttaataaagtaaattctccttcaaatgggcaatagtacacgtatatagaaaataccataaagttaaaagaccaatgttgaatggttcattctatattgctgggaaatatatattatactacatgtacattatttgcagtatacataaatcatatattatcaatattaattcaattgattctataataaatatatatcagtataatgtattatatatattatacttaactcatgaagagatcctatgaactcaacaagaaaaaatatccaaattgaaaaaataggtgtggatatgaaaagataattcacaaaagaagaaaagtccaacaaatgtatggacctaacaaacaatgaaaggaatgtacataaagaagtttgtggaataccattttttaaggtgaaaatcccactactaccaccacttttcctattgtctatttcctgtttcatttttattcacagcaaaatcaacttctaatgtactctatgtattatctaacacactgtaatgtatattttctatttgttttattatttgtctctctctaccagaatgtaagctccttgaaggcagagattgttatatgatgattgctgattctcagaagttagaaaaagagtggcctatataggcttttaatattttttgaataaggggctggcccatggctcagtggttaagtttggacactcagcttcggtggcccagggcttccctggctgggatcctgggcatggagtactgctcatcaagccatgctgaggcagagtcccacacagcagaaccagaaggacctacaaccagaatatacaaccatgtactgggggctttggggagaagaagaaaaaaagaagaagattggcaacagattttagctcaggtgccaatctttaaaaaaaatttttttgaataaatatcagattatcgaaacttaaaagaatgataatgcttaatacaggtaaggttttggagaaatggacactcatatactattttgtagataaactgataaattctctgctggacggattttatatatacgtataaatttacaagtacatacagcaattatcactttcgagtttattatgaagaaaacatagaataaggacaatataatatttgtttaaagatattcattgtaggatcattgataaaagcaaaactttggggaaaaaatctatgtttactaatgagagactgtttaaatcaggaatacctaagttcacattatcgattactattcaactactgaataagtggtgcacgttttcaaaactgtttatacgctatttccatctttgtgtctgtgtatgataggtatatgcatagctagcaaacattttttgaaagattatgcaacgttaacaatggttatatctaagtgagattggactttttatatttcatgaactataaagtaaaactttttaaaaacaaaatgaaaactctaaaattttttcaagtgattttttttaatcttaaaaattttgagggcctggccgggtggagcagtggttaagttttcacattccgcttcggtggcccggggttcgccagttgagatcccgggtgcagacctatgcgctgcttatcaagccatgctgtggcaagcgtcccacatataaagtagaggaagatgggcacagatgttagctcagagccagtcttcttcagcaaaaagaggaggattggtggcagatgttagctcagggctaatcttcctcaaaaaaaaaaaaaaaattgtggggtgtgcgtgtaggtttgtgacctgtttacacattttcagatatttgtcttttgtaggtacacaagggatataggagtaattctatattttgctttataaaaagaacctcatttctttctttcacacttatactacttagatttactcactacgaaaaatgaaagtactactcgtgcctatagcaatacatataggatctttgaaattctgggtaagatgtgagggctttgccccaaagagtcaagtttcctacacttccaattaaacaagtcttttgagagagtaattaatttttttaattaaaaatccctatactcattaatacattctctaacctatcacaggtggacccattgcctacctagactctaagtctgttccatacttctggaatggtgtcattgcaatgtcacctcatccacaaaggggattgtctttacagattgtctcatctggaacatttctaggatttagtctttatctgtgtcatgttacctactaaactccagctggttttaagattatatttgtaagtaccatctactgtgatggatttaaacttcttgagaatggaattgaaggctgatttaaaactccttttcttttttttaggaagattagccctgagctaacattggccaccaatcctcctcttttttgctgaggaagattaggaggattggcgccgagctaacatccatgctcatcttcctctattttgtgtgtgggacacttgccacagcatggcttgataaacagtgtgtaggttggctcctggtatccaaactggcacaccccaggccgccaaagcagagctcgtgaacttaaccactatgccactgggctggcccctaaaatgttatctcccaaagctccaactaaagacgtttgtcttctcagagtgtggagggagaagcagtgcacaggtcatcagctctgagtccacatcctggctcagactccttacagctgtggacttgggcaaaaacctgtcatcttaaaagccaagctgtcactaggattagatgattaggtagaacaatttaagaaaaatagaaaaaaaaaagaattgttaacaaagatcaaaggagacttatatttacagacagactagttaccacttggacaacacatggtaaatgaatgaatttgtaaatacagatttacttatttaggatttacggaaggaagtcatctcggtcaacatcatagcagaaagatgaccagacttctaattcacaatcaagtcataatctaaggacaagtctctcacctgatttattttctctgcttttgtaattttgctttgaacatttgtgttcgcaattatcttagccaaaactcaactctcacctgcaccataagtttctcttattttcttatatcaaattatccattgcaaattctgaaagcattccattcttattgcttgtgatcgcatgaaaaaacttacataagagaagtcttatcttactgtatgctccctattgtgaaattctctttaatatgttctttttacataaaagaattatcagtaattgtcttaaatacagaagcacttgctctggtacatttcaaagagatcaggtctacaattgccttgtaattgctttagcgcttagggatacgtaatatatgttttgtaataagaagccaatatggttctgtgttggtcatcctggctctgtattgtttacctgctaccgcatgagccgaactgcagactcttacttgcacgtatagttctgcagcacagtgatgtcatgacctatacggcattagaactgacaacaccgtggcattactccattccagagcactgacattaggcctaggagtttctaaatgaagatttcatagggaaaactcaaattaagctaaaaccaaatgagcggaagaattttaaaagctaaatggccctatttcttcgtccttgccctccttctctttctctcccctcccctcctcttcctccttcttctgcctcttttatcctgagctaggaaaacttctcaaagtttggctttggttagactttggtacgtcagagaaaactcccatggtaaaaatcataggatctttttttgagtttttcttttttttttttaaagatttttatttttttcctttttctccccaaagccccccggtacatagttgtatattctttgttgtgggtccttctagttgtggcatgtgggacgctgcctcagcgtggtttgatgagcagtgtcctgtccgcgcccaggattcgaaccaacgaaacactgggccgcctgcagcggagcgcgcgaacttaaccgctcggccacggggccagcccctctttttttgagttttgaacagctaaacttactataaacagcaagtggaagaagatgagagagaaaaacaacttcttatttacggtcataagaaaattttaagatcattctttactgaagaccattgtttggatgcaccaaaagcattcatagtaaaaggcaaataatttaataaggtggaaatcattgaatgggtactaataactacccaattaattatttgtaatctgtcttctcattaaagactgtaatgattgagttaagggtgagaattgtaatgtttgttggaaacttacagaaattttgcttaattttatactgtcttagtagagcaaatgttgaaaattgttaatttaacaaactcaaacaaacaaatctaaatgcaatacagtccaaacaccagcaaatctacacaaggttcttcatgatgtggccaccactcacctctccaaactcatctggcatcactccgtcaccttcactctccctcaaaccccacagcagagattaaagtcctgtagaaatgtgtactacttcgtgcccctgtgactttgctaaaaacaacacgatggcaaagtcataagggtctttcctgagaactttgtcatcccatcaggacattaggacattgttctgaggagactgggaagcaactgagaaggttaaaccaaggtctgaagcaccactattgaaattcgacgttagaatgatcattccatgcacagtttgtagaacataaagaaaatcatcacctgagaaaccagttaggacacagttgtcctattccatgtgagaaatcatggaagcttcaactaggggagtttattaggatggagaaaaatggatatattcacaatgtgttagggaggaatcagaggactcaatgttaaattacgtatggggctaggtaggaggagccatcacagtaacgctgtctagatctctggctttaaccatctgaatggaggtgtccttacaggaaaatgtttgatgggtcactgttagattagattacttctggtaagtatttgtggtctccaataatcacgtgtaagtgaggactccaagtgtccttcactcagtcttcttgctcggttaaaaagaaagcattctcaggcgaatgctgtcagggacatagacgtttattagcaaccaagctcaaaaacaggcattcaacctgtaagtgcaaacggctctggctctctgtcctttcagggactcctatacaaccttgcataaagccttcacttgagacaaatgtgctaacattctagtggcaggatttagctaaccacctgtttggagggaggtgtccaagaatcttctgaagagtttttggattgacgccaagagcactatacctaaagggacagaccactgtaccttaaaatttgttcttaacatttgtctagcttatttgcctgtcttggatactattaatttcacaaataaaacctccttcttaatgtccattatgctaattcacaaaacctctgatcttgtttggacacaaagatagttgagtcccttggagcaatcgtatcttttaattaaatgctgattcaccctgggagtgttttctagattaaggctactgattccccctagggtgtggatgaaaactaacacacatatcatgctgacgatgctgaggtggtttaagcagattgcagacaatgtaacagaggaaaaatgatgggtttagtttgggacacgtttcctggaggtggcaagtggagacacctccataaatgctcaattatacagatctgatatctagaaaaaagatatggctgcacattcaatttggaaatcaccagagtgtggtgtgttttgctatttttgttcgtaaaaatgtataacacagtgatatcatttactcattcacttattttttatgcaacaattgttaaatgtctatcatgcaccagatgatgtgtttggcctaggaatagggagtcaaagtcacagacagttctttcaaaaagctcatgttccgaggagaacacaagcaagtatgagctaagtaatacaatttaggaggattaatgtaaagtagtccctcccatcccaataaacaactgcaattgagaacagactcatttcttagaatttaactctttaaaatggtgaattatattggtaaaatcaaaaagacaactatgccagctgcatttaaaatatgaataagagtactttgtagggaagttgcctcaagaatggattaggaaaaagataaaagctggtgaggaagtagagaaaagagaactctggggcactgttggtgggaatgtaaattgctacagtcactatggaaaacagtatggaggttcctcaaaaaattaaaaatagaactgccgtatgatccagcaaccccacttctggacatatatctgaagcagatgaaatcactatctcaaagagttatctgcattttcatgttcaattcagagttattcacaatagctaagacttagaaacaacctaagtgtccattggcagatgaataaagaaaatatagtgtgtgtatacacacacacacacacacacacatatatatatacaatggaatattattcagccataaaaaagaaggaaattctgccatttgcaacaacattgatggaccttgagggcattatgctaagtgaaatgtcacgcaaagaaagacaaataaggtatgattccacttctatgtggatttgcacaacattggcctcacagaaatgcagagtagaatggtggttaccaggggctaggggtggggcaagtggggagatgttggttaaagagtacaaaccttcagagtaacgccatggtgttgtcagttctaatcccctatgggtcatgacatcactgtgtgctgaactatacatgcaagtacaagtctgcagtttggatcaggcagtagcagataaacaatacagaaccaagaggagtaagttccagagatctaatgtacaacgtggtggtgactatagttaacaatacagtgctgtacatgtcaaagttgctatgacagtagagttttaaaattttcaccataataacaacaaaatggtaattatgtgaagtgaaggatgtgttaactaaccgtattgtggtaaaaattttacaatatatgtgtatcgaattatcatattgtacaccttaaacttatacaatgttatatgttaattatatctcaataaagctggggaaaaaaagagaatggattagggctattcataaaaggtggaatttgaagagccatagtgacaatctatggcatagaccatggaacatagcctgcaggaattccaccatgcaggtaatattcattccatgaaggcttcgtttcctaaggaagtgaacgcttgaagatgaggatccaggtgttataatagagtagtagttggatgagtaatgaaatatttttcatatttaaaaaattaattgatctatggtttaaagtaatgggatcatgtcatatatattgagttcttgccagaggggggaaattgaggtgcaaattttgcacttgaaattgtaaaattaggttaattaatgattttatatatatatatatacacacacatatgtattttcattccacatgtatgtatatatatatatatataaattttttttttttcctgaggaagattagccctgagctaatatctgctgccaatcctcttccttttgctgagaaagactggccctgagctaacatccatacccatcttcctttactttatatgtgggatgccaaccacagcatggcttgacaagtggtgccatgtccacatctgagatctgaacccgtgaaccctgggccgccaaagtggaacgtgtgaactcaaccactgtgccaccgggccagccccgacatgtatgtatatttattatattttttttattggaaatggaagaacccagcctgttttaagttttgaaaacatcttgaatgcctttacaagtgttaccaaatttccgaaactgttttactaaacactgtttcttaattttataatctaagtggctgtcaagagaaatttaatccttatgtttctgattcttttatatttggcctatccaagtgtttcataagaaccatttgatgtctaaaggatcttagaggctttttccttcaagcacgtttaaaatgagttattcaggagtcaagcagcattctgtcttggtaaagaagattgtccctgagctaacatctgaccaatcttcctctattttgaatgtgggatgctgccacagcatggcttgatgatctgtgcgtaggtctgcacctgggaccccaacctgcaaaccctgggccacagaagtggagtgcacaaacttaaccactatgtcatggggccagcccctcaagcagcgttttatcagtatcagatggaaatgaaactcagaagccttcaattactctgaacagttaaagactgataaacatcatcaatatttatggagcacttgaaggtctactttggtcaaaatacaaatagaccaaagggatctgaggtcattttactatatttttgaatgtttatactttttttctttatgacaaagtaacagaaattgggatgaacaaccatttgaacaaacattgaattggatcttacatggtatgagctgaatggtcctggcaattgtctaaaacatgataagtgaaggtatttatcctggcatccaagatcacccgacctcttctttaacccgttattcttccctgagaggtccctagggcaaacatatgcaggagaactgtggctcgtcaaggatcagtctatttacctattaaactttggttcccaaatccaacacaaaactctatgacccaagctgaatcctgtaaataatgctttttgcctagggaggcagttttgcactgcgtgggctaaggataatcacaattcctgctcgttatgatgcctgtaatttatctcaaaatactttagtataggcgcagttaatactacattcaggaaggatacacaccaggaaagcgtattgaaaagtggttaattgaattcttctgttgttgatagctcaactaataaaacatactttgttaattatgatggtaagtgtcagaaataagttgttacagtcatgccctagtaacggcagctaatcatgacgttttggtcagtgatcaattgtatatgtgacagtggtcccataagattagctccatataacctgagagcatgacaggttataccatctcggtttgtgtaagtacactctgtgatgttcacacgatgatgaaatcgcctcatgacacatttctcagaacgtaccctcgttaagcaatgcgtgactgtatttgtaaaattagtggctgataattagaatgttgaatgttagaaagggctctatgtaataaaattaaagtttttcaagatatatggagtgacttaaatattgtaaaaatactaccaatgctttccatctttgagtgaacaagacagaagaatctagagaggccagtagtctttatacttggggttagtgttcctgttggccctaattgttttgggggtttctttaattgatgctgagctattgttaatggacctctgcctttagaatatgtcaccatgtgccttaaataatctattccttcatgttggaggttggagaaactaaaaggacagggttggggttcgtcaaacctatagaactgtgctgtgttctgcgaacagttgtgtgaaccgttctgtacttgcttgataataatacctatttaattaatgcctttaatatggggcagaatgtgatttgagactgctttcattaaaacctggtagagaggttgtgagaaagtagctaactaacgcatctgaaactgctactgtagctatcgtctaccacgaagatcaatagagttagttttgcattaccaaataggcttattgaagtcataatgcaactttatatggttggcgtgagaaatatgaagcgatctatgtgagcactcaggacagttactggcatgcagacagagttcaggaaatggttatactactaggctaaaatgatctggaaccaaaacaagccatatgccttctacttactctaatccatgcctgagtgtcagattttaccaccaactgcagagaaagccttttctttttcagaaagaaaacgagtttgtgccaatgcataggcaaaggtggtcccagccacccatctcaggccatcttagaccaggcacaagtgcagactatgggcttgtcttactttgtaatacatttggaaggcagagaattctcagaaagcgcaggagccagggagaggttatatttctcctatttctctagctctgagaaactaggaagtcctacaggtcctcacaacatgcctagtgaattcctgagcctctggaacttaggccccataagacatctaagacatcgtggaatttaaccaaactcattcaattctcgaatgagaaggtaagtgtgggagttggcagagggagaggacttcctttcccaaaaacatgctccgtactccaaaccgtggcttgactgatatgatgcactaaattatatatataaacacccgtacatatatacacattatatgcgtaatatacaaatatacatacatacatatatatgaatatctatatatccatatacgtatatgtcgtataaaatatatggatacacggaaagatagacacaaatgtggttttcaatttttggtgcttttaattatttatttctttatgcagatatctacattttctcattggacatatatgattaaaatagtggcagtaagtctccccgaaaataattttttttttgtattgtgttccctttcttactttttttttttcaaagattggcacctgagctaacaactgttgccaatcttcttcttctttttttttaattcttctccccaaagccccccagtacacagttgtagactctagttgtgagtgcctctggtcgtgctatgcgggacgctgctgcagcgtggcctgatgagcggtgccatatctgcgcccaggatccaaactggcgaaaccctgggctgcggaagcagagcgtgtgaacttaaccattcggccaggggatggacccctcttacttttttttaaaaaaaatatgcattctcctgagaagaccaaattaaggcctgagcaaagttatatgaatgtgtttgtccaaatgacatctctttttatgtagttagtggcacttaatgtgatctgaggttgactatgaatgggaagttggcaggtgggggcagaatatctcagaaaatagaggccgactgcatcaagtgaagacattctccctccattcaaacttggcccggtacaggagctgtctaaggcaattgggagaagtttgacaggctaagcttttattcatttttaaagtttaaccctgagtcattttacctaaatcaagaagctatttttagggtcagatcatgtatgcttttcataagcagcagaggtatttcatatctgttccaagtcaaattttggaagcagttattcttcttgaaagttatttttttttcctgtggcatttcatggaaaacatttgctctagccaacaagttacggatatgttttcttagactgaaaagattcttaatatgaataagctaattgaagccatgggaatagtgcaattaaagaatttttggtttataatacaatcatgtcgttggcaagaatctcgagaagtcatctatttcaactcttatatttaggccaaagcaatcccactatccttccccccatcaaatagttatctgtccatttttcaaaataatttaggaaatataatacaagcccactaggtaaattctgccctctagtagttcttaggattgtgcagttatttggatatcttttgttgaagattaaactataaaacaccataaaatattaagccgttttatttttattagtttctactatcatttgtgatctgcgtctggggcctccgtagatcttctactctactatctttcattttctgcagtttccatttgtttcctccagaagttaggaatttattgttgtagttgtcacaagcaacaaagactcgtctgagttagtgctaccatgtgatggctttgtaatgtgtcaatgtggctaggctgaattacatctcccaaaatgacctttaacggtatgtttcctgagggtcagataccaagaagattctctccagagctggagagaggaaggaaggtggcagccattttgtaggatacataccttgttgatgatcggctggcttactttcttggtgtgaaacagcagctaggcttgcaactgctctcccttacccctgaaccttccttcagtttctccgacttctgagccagatgtgtgtgtgcccatgttcagctccttgaggaagggtcccggcttctgcaaggtacgcattacaaggtcagtggcgacgataatgaacacagccttcagttcattcttgtggagctccaatttgtcctcatggggttccagtctgctgatgatgccttccaggctgtctgccctgggagctttgagccctggcattagatgtggaggcagccttgtggacacatttttgccaacccccaaaactgggtaaggaaataccctgtaataaattccttacctacacaggctattggttctgcttttctggttgaaccctgactgcttcatggaggaagcagaaccagagaccaagaattaggattagaaatcaagactctctctcatttctgtccttcctcagtctagcttcaagcttctctttctctttatacagtactcctgtgcatgttcagaaaccatgttggaaaatctggccctgagagttaatagaatcacttaaatgtctaactacctgaagagacactaattcccttgttcaatatctatcttcctctcatggcaaacactaaattctcaggaaacagactctgttgaacacatctgaatcatatattctaggtttgagcaatctgctgtttctggggactcaggctatgtggaaggaattgggctacgcctggtgcccaccactagtccagacaactctgtcaaatgcagcaggggtaggttaaactgctgggatttcaatggcattttcacgtggacaggagaaattagcaagtaaactgaccactgctggccaggactgatagttatcagaatctatcagtatatggtcatgatggttgtttctggttggtgtctgttctgattagctggtgtctatactgtgtaagttgttaaacattttcaacagcacccctgtccacagattcaacacaatatgctcattcatgtatgcaaaacatattcttggagtttgtagtaggctgtaggcacaacattgatttcagggaaaacaaagatgagtaaggaggcaaggttgtagtccaagagcacagaatttagtaggagagacagatacttccaacttctagtgaaggaagcgttggattcggagtcagatatgttagatttattctttgccttatcatttgctatctttttgaccatgtaattttacggtgcaggaagctgtaaggaaagagactatctacactctaacctcatcacttaaaaatctgtatgaccttgggccagttatttaatctttccagggtaaagttgttatgtctaaaaaacaaggatgggattgttatgaaaataaaccaagatattatgtgaaagaatgtagcataacagtggcacgtgtccttttatttttaatttcatcggagctgtttttttaatcaagaatttttaaaaatcaagaatgcagaagttttcaaatcccttttcaaaagctagaagtataataatactttttaaatttggccattaatttgatcaattatgtaaatagattttttaatatttaaccattcttatttttgcacaattaaccatgcttgattttttattatattcctggatttaattaaccagaagtctatttaagatttttttgaaatctatctatagtggatattatcttgatgcacaaactcaattgtgaaagaaatatcacagtttttattacctttaaatcaatttaattccaacttaaagcacatatgcccctaggttggcaggaaattcaatgtcagttattcttgagtctctttcttattactaaggtagtataaaatttctagggtcttacaaagtaccaagacattggaggaacccccttgtcatcagtcatttctgctcctcagttgctcccaagctacctattattcagtcctcgatccctaagctgccgttttcctccgaggttttactgcttcctaggccacgacagaacagagttcaggtccctgatgtttcagggaattataaatctctcttttctcatcattttgagggaatttcttctttttatccctgtaagtgaaagctgatctccaccatgaaaatactttacttaatctcttcaatggcgttttttgcaaaagaggagaaagaatcacacaaaaatccttgaggcaatgaattacaaatcacaacgacttggggccaagtgaggggaggagtggctatagagaccagcaacataatttgataacatgaattgtaacactttccagttcttgcattctttgtaacagtttaaacagcacaaaaatatcagttccttctcagagtttggaagaattgcaaaaaccatcagaatttcacgccttttcagagaatagctcttttaggagtatttccatttattacatggttatggatgtattcaaattttctacttttttgtaagtcaattttggtaatctcaatttttctagagtcattattcatttcattggggttatcatgtgtagcggagaattatgcatagtactgtaatttttaaaagcttatctgtttctgacgtatatcttttaaatttctaaatagtaatgttttcactttttacttgatcagattatttaggaagtttgtatattttgctgtcatttttcaaagattcagcaaaaaaaagagattcagctcttgggtttttattctaatttaatttttccagtttcaaattcattaatttctgcctcttctttcattctcattttctaggtttgttttctttttctatttctaacttctcaagtttgtcaatgaaaataatccataaccaatccgtaaatgaaaatttgggtgagtttattctgagctgaaatctgaggaccatggcccggggcctttcttcccaaaggaagaaagggcaccgaagaagtggggtgcacagagtggttatatacccccaaacagggtgtttcacatatgattgaaatgtccctcccacaatagtcacaagattgccctggcggcacagcacttgatggacacagcaggtagtgggtctgctatcttgatgggcgtagcaggaggcaagtctattgtctcaagctgggcggtcacaggtgagcacagcaatcagtttctagcctaaggaaagatgcttagtccttaaggagatgccaaagttgggaggggcagggaagttgcacctttatctcaagggcctttgttcttgccatagggaaaatctaaagcagatatacaatgcatgctcaacagccacagtcaggcccttttggaaagacaaggtcaggccgaattaggtttataccaaatggcttcctgatattctccaatatatcctattgcttgccatttttatttgtcaagttgaaagctgaattcatttatttcgaagaaatcttatttgataataaatgccctccatactgtgcatatgcctctgatccaggtgtggtcaggtcttagatttgaagtggctgtaattgtgttgtaatcttgtaataacagttttgttttcattgatcaaaggttttttgtatttttttaggagaatattttaaattctgcatatattcggtacatttaattgttttatatatacacacagatacacactttcctctaattttattgagttgtgatctgtaaacatattctctgaaatttcagtcttgaaagaatttatattaattctcttgtatttttaatattagcagcctactttaacctcctctttctcttccctgaagaacattcaacagtgaggctaagagttcaaaatagttctagcacttttctatgtgccctgcacagaatttgttccacccatggctccttctggcttcaggaaattcatcgctgattactcattctcttatactctggtagaacagtggtttgttattatttcataaaattttctctacccttgacacataaaatccttgacttcagttctctttttacctccattattattcttcagacattttattagctgctcttactctgtatccctttactgtagtttccaccaggatttttatctttggttctctgtgtttctctcttttttttgcaagtcacagtgtgttaggcatgctcttttatttctgtaatatcacctatttattttgcattttcttaccagtaacttaagtccatctttctttctaactgcctactgaacataatcactagaacgttatgttgtctcttgaaattaatataatatcaaatataagctaataacaaaaaaatgatttctgccacaatgaagttagaatattcttgaagacttcaaccataagtacatgaaaagttttttgattaatacaacataacctataataaaggaatagaatatgtctttcacacaataagtataataaaaattcaaagaaaagacatccttgaattcatttatatgtattaccatttattctcaatattatgtctctgtatgtttctcgtttaggtgaatttctcttttttctgagtttctttctgttaaattttattattatcatcattattaagcctaatttatccagttacagagaattctgggatggtttaaagatatgctctagattatggataaaagacataaatgcaaccaagacttcaacatcagcttctgtgaaatactgttagttatctttcctatctccaagtcaatggtaaggaaaattttgctaaccttatttgccaaccagttgtgtatcagcctaatgggtattgatagccaaaccagattttcctcattaattagtatctattgtataacatacaatgttgtagtgttaaaataaaatgtcctattaaaatcaagctaattcaaatcttttttcttttcctaaatcttccatgcctatcaatttttcaacataactaaattagattagtcagacaaatgtgttctttagcaagctacacaggtatttatctagtttctagggacttttcaatgttgtcaatttatattaaaaagcagtagaatctgaatgtttttggactcaatatctctcttttcatgtgaatataagcaaagcatacattttaactgagtaaatagatgatattaagtgtgttgatatggttaattgatggattatttataggacaaacataaatcatttttaaaataaatcacttttgactcctcgtttctcttctcaacctcttccctttctggccaaataaatttatagtcacatttaatatttgacaacttggaagaagctgcattacaaaaaaattcagctgggcctagtaaaatctttgataatgatagtttattgcaataaacatatgactgttgcaataatggaatctgacataatgacataaccgctatattaacattgcacatctgcttatgaaaagcactattttattatgtgctcctttgcttgcttgccaaatgaccaactttctatttaccatttcaatcttaaaccaaattgagatatccaaaccaggaaattcctcccttctttccttgcctgtattttggaaatctttttaaagttctgatttatattgcatagctgtggatcttcaagaaatgatagtggcagccagtcttggttcataagggcccgaaaagaaaaatgatttttgagaaagatttcaatgagagaacatttaggttttgcaacatcaattaaaggcttatttttgcttgcattttgtttttattaattaattaccatagctagttgatggctaaggctggggaagggtgcttattgctctaatcctagtgagataactagctgggcagattcagtaagcaatgtcctgaaagagtataagatcaagagccaaggaaatgttcaatcaaaagaaatagaaaagttgctttcagtttttatttgttacaatatactgaaggggacaacattcacaaaagaattttagggcaagacaatactctggatgatgacataatggtggatacatgtcaatattcatttgtccaatcccataaactatacaacaccaagagcaaatggtaatgtaaactaaagactttaggtaattacaatgtcaatgtaggttcatcaattgtaacaaatgtaccactctggtgggggctgttgataatggtggaggttatgcacgtgtggtggtaggaggtatgtggggaatctccatatcttctgttcaattttgctctgaatcttaaactgatctaaaaagtagtcttaaacaaataaatatatgacaaattaaaaaaacctccaacttgggagctggcccagtggcatagtagttaaattcgtgcactctgctttggtggcccagggttcatgagtttggatcccaggcaaggacctatgcactgcttatcaagccatgctgtggcaggcattccacatataaagtagaggaagatgggcacagaggttagctcagggccaatcttcctcagcaaaaagaggaggattggcagtggtgttagcttagggctaattgtcctcacacacacacagaaaaccctccaacttgttggagcatggaaatacctggatgatagcattacagtattcagtaaactacacttcaatgcatgtagtagactattctattggtgcaaaggactatccctcccagtgttcagattgttgtatagttagtcccctcccacactgcatctgggccaatggggcattaacaagtgtgatgcaagagagtcttgatacacacttacacattagggcttttttgattggaacactctgtcttagaacccagccaccacactcaaagatgtccaagctatcgtgctggagaaagagggcccgagaagaagtccctcatagagaaaagcacatgcagagaaaacccacatggaagagggctgagggctccagctgagctcccagattcatgagtgacccctggccacaccacatgaagtggaggaaactcccaatcaactcgagaaaaagctgaggaacgataaatacttgttttaagccactacgttttgaggtgatatgctacccagtaataattaactgatatactgtctattcagtttcagctccctttatgataacctcataaaatgtcactctaggcacaatgattctccacctttccctcccctacactttgatctttagtactcctcaatcattcttccatggtttctctagttttgctttataccttgattcttactcttaatctgttgagagatggagtgaggagtgtctataggatgcttataaaggattatattagattcatctggaggatttttcatgacgagtcaaagaaatttggttgtgttcggattctcccacttcatctattcacatgaaatcatttgctcagtgagacactgccctgaatggagtgagtgttgtctccagggataacaggaataaaaactgaaaacaattcttctatcccctttgattgaatattctcctgtttattgatcttattctctttcaggacatcacttactgaatcttcccacctggtcatctcattagagttggagcagtaggcaccttcccccagcctcagccagccgctatctatgggaattaaacaataaaaacaaatacaataaaaataagccattaccgaatgtttgcagaatctcaatattttaatattgaaatatttgctcaaactattggcaaccacttatcttttcactgtctctatagtttttccctttccagaatgtcatacagttagagtcgtactgtatgtagccttttcagattggcttctttcacttagtaatatgcatttaagttttctcccaagtctttgcatggcttgatagctcatttgtttttagcattgaatagtattccactgtctggaggtaccacggcttacctatccatttacctactgaaggacatcttggttgcttgcaagttttggcaattatgaataaagctgctataaacatccatgtgcagatttttgtgtggatgtaagttttcaactgctttgggtaaataccaaggagtgcgattgcaaaaccacagggtaagaatatgtttagtgttctaagaaactgccagactgtcttccaaagtggctggaccgttttgcaatgctgccagcaatgtatgagtgttcctgttgctccacatccttgtcagcgcttggtgttatcagtggtccagattctgaccacttcagtaggtttgtcgtggtatctcattgccgttttaatttgctcttccctgatgacataaaatgtggagcatcttttcatatgcttatttgccatctgtatatcttcttcggtgaagtgtctgttaaggtctcaggcccactttttaattggattgtttgttttcttattgttgagttttaagaattctctgtatattttgcacaacagtcctttatgacgtatctttgcaatattttctctcagtctgtggcttatcatctccttctgttgacacttcacaaagtagacataattttaatgaaattttgcttatcaattattttatgaattgtgcctttggtggtgtaactataaagtcattgccatacttaaggtcatctgtgttttttctacgttatcttctacaagttttatagttttgtattttacatttagatctgtggcccattttgaattaatttttgtgaaaagtgtaagttctgtgatttgatttcattcagtggaattttgtagttttccttatatagatcttatacatatgttgttagatttatacttcactatttcgtttttggaggtgttaatgcaactggtattgtgtttttaatttcaaattcctcttgttgactcctggaatataggaaagtgattgacttttgttgtatcctgcaatcttgcaaaattgcctctcaattccaggagtttttttattgttgttattcttttggattttttacctagatgactacgtcatctaggtaaaaaagaagttttctttgttcccaatctttataacttttatttccttttcttgttctattgcattagttagaccttccagtacaatgttgaaaaggagtgatgagaagagaaatccttattgtatacctgatctaagtgggaaaactttgagtttgtcaccattgagtatattagctgtgggttttttgtagatattgtttatcaaactgaagaatttcccctctattcttagtttactgggagttttttttatcatgaacagagttgttcatagtattccttataatgtccacaggataagtaataatatcccttctatcatttctgatattattaatttgtagcctctttctttttttcttattgaggctgtctggaggcttatcaattttactgatcttttcaaagggcaacttttggtttgattgacttcccagatgtttttcatttaggaaatgttactctcgtctttttatagagtataattcaactgtactctatttgctccattcacttccccagctagaagagacaagaaagtctgggaaatagttttgtacattacatctgactctttcccaggtttataaagagtctaaaatattttcttggtttacaatgcatttacttgaaggagcacaaacaagtgttcttcaattttgcacaatattagtaagacttctgcctctatataagtcctgttggggcatggatttcattgtcatgaaaaatacttttataaagctggcttagttgatttgtttctgcaacaggtactactatggaccaaatgtttgtttccctccaaaattcagcacctgaagcctaattccccatgtgatagtatttggaggtaagtcctttgggaggtgattaggtcatgcaggtggagccctcatgaatgggtttagtgtcttataaaagagacctcggagacctctcttgttccccttagtccttgtgaggacttatggtcgcctacgaatcaggtagtggactctcatcagacaccaaatctgctagtgccttgattttggccttcccagcctctagaactgtgagaaataaatgttgttgtttaagccatccaatctattgtattttgttataacaccctgaatggactaagataggtacaaggaaattttttttttttaaattctattcttaaatttctaactagcccaagaagaaaaatttctaattgctccaattctgcttccctgtatctgatttattttatcttttcttgcagcacatctttcaatgtcataaagcttccatttcaaaataaaatatgtatcaagcacttaaggttttcaatataccttgcagacattgctagttattcctttgaagaagactatgaagtaagttactacttagttgagagcatcatcttttagatgcaggagatgaggcttgagagattgcccaaggtcacgttatatattaatgacagagatgggattagaattctcagtcttcggtgtttctaatttcataaaatcagttgaatctgagctgaatgttgcattaaatgaagaaagaagtttcgaggaaggagcatgtggctctagcgccaggaatggcaatttagcaagttggtggatgtgattttaagaatacatttgtctcccattctgacatggatttctttatcactcctcataatttcttttgtgatgatcttaccaaaaagagatctgatgttagacactgcagaagagatgtaaatagcctaatatgataagtaggctgcctcttgtaagtgaaaactgagtgaaataacggagcttttaaaaaggtggtgtatttaacgcagacccacatctcgcttcagtttttgttagtgaaaaatacactttccccaaagaaattacatagttatccatctagagtattatatggagtgcatatgaaatcatcattgctagtatgtatttggctatatatagaacctattaaaagaatatcaatttactaaattaatttttacttgtttggggcagacgtataaagtatagtatcaaagaaagtaaaatactactagcatctgtatttctatttttgctcagtattttgtttattttcattgattcattttagtaatgtgctctaaattaattagctgcaaaagaaactttgaataattcaaagaggcactttagggaaattgcattttttttccagttggctacatcataactttgttatgatgaataatagtgaggcagctatttgggttgatttattgttctaacataaaaaattcatattataatttttagcagaaatgaggctatttatagtaattacctttttcaaagacatcattgcaaagacgcaagggaatccacagtaatattcattattctgaaccttaagagataacatgtattacaggatcaagaggaagcaagaatcaaagctatactatttaatccaggttcttggaactgttataaatatgttgaatccaagaacatttttaatattcttgtttctactatgattcttgactcaaagcatttttttgaaaaatgttaatttttttaatgtatttccattgagtcttttgttttcaattttgctcattaacaaaatcagttggaaatgattccttggtgtgctgttttttacctgtttgctctcctgctcaccccacgccattcctccattccaaccatatactcaaccacatctctcttctcttctggtctctgcactgctcttcgccctggaattctgacttccacggactacatgacttgattctttagtcctttggcttctagtggtatttggccaaggaggcacaacgtgaaatggaaaggtgagagagagagagattaagatagtctccatctgccctccaccgcccccaactcccatttccctctgtgccttggctctgatagtgtctgtattccatagccacatctcccagtggcttggcccctcttgcatggagtcagctctcactgaatgttgattacataatttccttccctttggcattagggacagtactggcttcccattgttgctaatatctggacactttcccatcccttattggttttgttatctctgtcaatagtcctttcattgaacttcaggtaaaagcttttgaatgggccatctgtttttcctgggacactgaatgatataattggtttgtataaaaatgaatgtatctcctataaggagaaaacaagaaaaaaccctttcacttatcagcatatttctgattgcttttcatactttgttttctttatcttcctcaactctaatgtcaatctgtagcatggaagagaagcaactggagaaacgaacacctcaataacactctccttcagccttctgatctttggctggtgactgccaatgcttgaatcctagaaactagagtttaagggagtttgttgatgcaggctaggacatagatcagagagaagggaagatcatggagctgaagggacaaacgaagcatatctagtacagtctacctctttgtcatctcaatatccacttgtggcctttgtccacatgaaaaaaatgcatgtctctaacataggagacacataaatccatcacctattttattatcactgactgatgataatttagctatacacaaagccaaaatcgaaactgtttgccaaaaatgttttacatataaggtggtgggaaatgagaggaagaagattaaaataaaattaaaaagttaatgtaaaacataggttcctcaattaactagccttttggtggtgaacagcattccttgggtacttaagcccaattcactatctttcaaatctcacgtgtgcacatctggaatttggagattcaaaattcttaccctttcccttgtctgcccaaatgtcttagggtcctatcctttttccacaagtaaccttaccttagcataaaactcatggctgtttttttcatttagttggatttaacaaccacgcaattacattcagtccttgggcttgatgctcattcatgtcttccctgtggctaaaggacataagggactcttaagtttccgcagaagctttgtgatttttcattcatgttctgaagtggaccttcagtctttttcttttctcttgatacaatctttgtaataaccattgttgccatagtgactaagtgccacagccacttgatctcccaatgccttccttgcatctgtacttcatcttatgccactaccagtgattatttgaccaatcatgatgtcacagcatgccagagattatcagtgtcccatttcctgaagcaaagaagctatctgtgagcttctcaaatatgctagctacccaatcccacaaaccaattttaagggtatttcctggggccacttcttgtgccaattactgaatcactcaagatcctgacaggaaacagatggtacactcaaatggaccaattaaggagaatttaataaagtactatttacagaagtatgtgtaggggtaagagaaaccaaaacccaaaaagatatggtaaagcaccctggggctagcaaaggctgggagcttttactgcccttaggcatgaactttactttccttctatcctctgatcttgttctggtacctcccacggataaactcgagcaggataatccttgcccagagatcaagagacagagttgatgcagctcataaagaatatcctcctttggacacagagagagaaggagaaggatatggggtagatctagaggcacaaacagaacgagtccagcagaatgtccaaattgggtgtctcctctcagcttcaacgtgtatataaagttctcatttgacaccttcaactggatatcttaaatacgtctcagacccagtattttgaaacacacgtccattgtgacccatctgaatccattctgcttgctgctgaaaagaaactctgcccaacaccaccctctctcttgccttccaagccacctccaattttgttggattttaacttaaatatttcatgtatttccttacttttttctatcactattataacactgtcactattatatttcaaacatcgtcagcttatagtttataaacagtacattataatttatagtttatctccaagaggtattctatttcacacagagcataagaatcttacagcagtgtacttccatttctcttctcctggactttgtgctactgttgtcacacattttacttctgtatatgatataagccccacaatgcattgatactcactttgctgtaaacagccaaatacctttaaaatgtctttaaatcataaaaatcccatcttttatatacaaccacatagttaccacttctgagtctctctggtcctttgtataaatccacatttcaatctgaaatcattttctttctgcctgaaggattttcttacacaattcatatagcacaggtctactggttataaattctttcagcttttgtatgtctgagaaatctttattttgcttttgtttttgagagatgtttttgctagccacagacttctaggttcactttatgtttcttatacttggattccattgggcttcatagatctaagggttcatattctttattaaatttggaaaatttaaacacatttttgcctctcccttctttattccacttcaggcactttaattaaatgtatattaggctgctttaatttgtctacagcttactgaccctttacaccttttctctgtatttttctttctgttttattttggccagtttctattactttggccttaaattcactcatcattttgtctacaaagtctaatctactgttaattccatccagtgtatttttcaaaaccttaaacatcatagtatttacttctagatcattcatgtttccacttaacacgctcaattttcttctggcttcttaaatatgtagaatatggttcttataactgttttaatgtacctgtttactgattaaatcatttgtatcatttggagactagttttgagtgactaatttttcttcttgtcacgggttgtattttcctgctactatatgtctattaattttttattaaatggcaggtatcatgacatttatatttttaggtgctggatatttttatattgttttaatattcttggccttttttttttcctgcaatgcatttaagtcagttagaaacaatttaatccttacaggtcttgcttttaagctttgttccgcaggacaagttcaatatttattctagggctaattttgccccatactgaggccccatgctattttgtgcagtacccaatgtcccatgaattatgaagttttccagtcttgctggtgggaactgctaactagtctctgccctgtatgaacttcaggtatttctccctctgattctctagggctgttctgttcctggcctcatatgcatttcttaatcagtacttagctgaaggctgaggggtgaccctctgcagatctctggaaccctctgcatatgcaagtattttctcttccttactatgccctgaaaactacctatcttgccataaagctgaggctcttcaactcagggggactaccaggctcccctggtcacctcctgactgtgctatggcctggaagctttctgtgagtagtaaactggggcaatagtaaggctcaatccagtttttactttctcttaaggattactgtctgatttcccatgcttttaaaactgatgactcaatttttttccccgagttttttagctgttttatgtaggagaataaatatggtctctgctactccatcttagcttgatgcagaagcccaataccaccttgttttaatttttacaccaatgtcacgttttctaaatgcaatgcaatttaagtcatcagatctggtaggacaggtctcttgactatattctttttccatacagtttttggctattttgaattctttgcaaatccacataattgttagagttgtttcatcaatttctaacaaaaaaagccttggtaggaattacatgaatttatagatctatttgcagagaatttctatcttaacaacaataagttttcaaactatgaagttagtatatctgttcacttacttatgtctttttaaatttacgtcagcaatgttttgtagtttttattgtagagatttagttgcctttcattagttttttagcaaagtatattatggtttagatgttattgcaaatagtaatttatattgcatttttcatttgtgtgtttttagtgtgtaaaaagttgatttttatttcatctctgtatactgtaaacttgataaattcatatataagttctaatagatttttaaaaatattttgcattttctctgtatccattcatgtcatctgtgaattataacagtcttacttctttattctcattttgtttgcttatctattgagttaatttctttatgaactcccagtattgtgtagattagggaggatgaagatgtacatttttgatattcttgatctttcgaaggaaatattcagcatttcaccattaactatgacattagctataggcatttaatagatacactttatgagatacgtaaattcttagcttgttagaaagtttttttaattaattctgaactgatgttaaattttgtcaaatcatttttctgtgtatattgagatcatcatgtgattttcaacattaataagatttgctttatgagctagcatttaattcatcttggtgaatgctccatgtgtacttgaaaacaacgtgtagcccaaatttcggtgtagtgttttataaatatttcaaattcaaatcttctgaatacttgctgattttttttttgtctactaataccatcaattcctgagaaatgattatctagatctccatatttgatggtggatttgtatatttccttgcttagctatatcaattttcgcttcatgtattttgaaactctgtaattagttgaatactcatttagaaatgtagcattgttttggagatttatatttttattatagtaaaatgcacttccttacatctaatgatattatctgtactttaatattaatataccatatgaactttcttgtgatgaggatgtgcatggtatgtttgtttccattcttttacttcagcttatcaaagtcttatatttaaagagcatcttttataaacatcgcacaattgcttggttttgttcttttttatatcgccatttaagattgtcatctctgcctttcaattaatgtattttgtccatttataatggatgtaaatttggacatgattaagtttaattttaccatcttgttatttattttctatttgtcccatgtgtcttttgtactttattttttcctgtcttcattggatggtttaaaaatttcttttagataaacatttaatttcagagcaattttaaatttacagaaaaattgtcaagatagtacagagttcttatagacctcaaacttattttcctttattattaacatcttggattagtatggtacatttattagaattaataaaccaaaattgatagatcattgttaactaatgctcatgcttattcagaattaatttttacccaatgtctgttttctgttccaggattccatccaggaaaccatattacatttggtagtcatatctctttaggttcctcttggctatgacattttcttagacccccccttgtttttgatgaccttgatagttttgaggagtattgatcattttatagaatgccccttaattggtatgtgtctgatttttttctcataattagactggggttatgggttttgggaggaataccagagaggtaaggtgctatttttattgtatcatattgagtacattccatcagcatgatgtcactgttgatgttaacgttgatcatttggctgagttagtgtttgtctggttactcctctgtaaagttaattctttttccccacttttccatactatattctttggaaggaaatcactctgggaaatacatgcttaaggaatggggagttatcctccacttccttgagggggcagtatctatataaattatttggaggtcttctcattgaaattttgtctattccttcccatttgctaatttatttaatcatttatttatataaatatagactcatggacatttgttttatactctaggtaataatcctatactactttatttattgtattgcttaaattgttccagctttggccattgggagttgactcctgtgttccttcaatatactcctaatcatcatgtgtctttttttttgaagcggtagtgcttccttactttctgacactacaacatgcctcagggtctttggtatagcccatgacccagtgttggagtcagccatttatgcaaggaatcatgttttcttttattgaagaatggtattataaatcaagatctgggcacacagtgtgctcatttctagtggggtgttgatccttctaggccttctaaggtgacagaacaatggaatatatgtgtgtgtactaacccatgtgtacacctacatctataaatatttacatatggaacaatctacatttctagtaagctaaacatgagtttctacttatgtgtctatctctaatatattacatgtgaaacattctagcctattctctttacttatccataagctcccattccaatggtgagaaaagtggctctcatcatctaccatcaattcacttaattgttcagtttcagtatgcatgtataagactatcagatttcttaattcatatccttgtgggaaataactttatcaactagagtacaatgctaaggtacagtttctttttcctttagtcttatagatttcatttatttccaaaatttgttaggtcagcatcttttgttcccatcctcttcagtgaggttgtttcacatatctgtaatataattaggcattttcattacattctacattttattctggaaacccccaaccttctaaatgatgttttgttaaatttgcatacactttgtggtgatgcaaaattctaaaattctaaaaatgggttttgacaaatgcattttgtcatgtatccaacattacaacctcctttggattcttttagttttccattttattccctttattagctttttaggcatattatttttatatacatatatgaaatttatacatatttatacaaaatatgtatttattttatttttaataatagctctagcaatgatgatatgcattattaacagtttattttgaattaacataatggcaattcacagataatgtgagaaccttattgcaatataattccatttacccctcattctttgcactattgcactcatttatttaatttctatatgttataaacaaaacagcattttttttttactttaaaagtcaattgtcttttaagattttactaaaagaaaaaaatagtacttacatttcaccacacattgcctgtcattggttatctttattcctctctctagatatcacactatctgctatcatttacttcagcctgaaaacctctctttagctttaattgtagtgttggtatattggaaatgaattctctcaactaatttttatctgaatatttctttatgatgtctttgttttgaagcatgttttcactgcatatagaattctaagttgatatttcttttctttcaacactttaaaagacggtgttccattgatagccggcttctcctcccttatacacattgtgtcttatttttctggtggctgtcttcagaattttgtctctatatttgttttcaaaagtttgactgtgctgtgcctgggtgtgaatttcttatctcccttggtgttttctgtgccttttgggtctgtaagttgagatttttcatcaagttttaaaagtttttgaccgttatttgtttaaatatttttctgcctaattctttatatcctctcattctaggactcaaaatacacatacgtttactcgtttaatattttccaatggactccgattctttgtttagttttttttcaatcttttattccttgtgcactttcattttgataattactattgacatatctttatattcactaattgtttctcctgcttttattctatctgctgttaaaacaatctaatcatttttatttcgtatactgtactttgcagttcaagaatgtcaatttgattctccattatctatttgctgtctctaccagagtcattcatatcttcagccagtctttccatcttatagtataaattgtttatcacttttataatagttgtcttaaagtccttgatgactaattgcaccatctgcactacccgtgattttgctcctattgattaattttgctcttcattatgggccacactttcctacttcttcatatctcttcacatggcagcatgacatggtatgtctaaaagaaaaatagatatttggttgtcatatctctgtctctgtctttcaggatgtgcagtcccactctttcatcaggcagctaaagtgaggggctgctctatctgattccaacaagacctggactgaatttttttaaaggacttaatttttgttagttttagattcacagaaaaattgagaggaaggtagcgagatttctcacataccctctaccgccatccccacatgcatagcctcccctattattaatgtctctcaccagagtggtacatttgttataactagtgaatctatattgacacatcataatcattcaaaattcacagtttacattagggtgcatcttggagtggtacattttatggagttgggccaaatgtataaagacaggtatccatcattatagtattatacagagtattttcactgccccaaataccctctggactcctacgattcattgctccctccaccctcaaagttttaactagattgtgttcaccactgtttcaaatgggacagtggagactatactttgccttttagcctaactcacaactttcaggacagcagcctttgatcttttcaggatctgagttgagagtagtttgggttctagccttagtaggtttgggctcacttttgcattatccttcagtaagccctagactccgagctctgtgagactatgcaaacactgttttccaggccgcatccattgctagctctgccaccttctctgtcattccctcatcaaaatttctgggggaggggattgtcaagaagaaatatttatttttgcatttggggcttttccagataacaatctatcttgccactctatgctgtcatttaaaactcaccttgtcagtgatttttccttgtcactgcaaagtctttccatctaaggcaggtctctcctctacatgtctacactcaccccagatactagttactaggcaaggaaggatcttcacttctttgtccacctatgaagatttcatccctctttggtattaatttattctggcttctttgaatcaactgctctgaaataactttatagaaaagtatgttttattagtttgtttcttattgttaacacaggtgttatggtcttcctcatcctgctacatcttaagcagaagttaaactctccacaattgcttacttcctgggtttctctaataacctgctaatgtgttttatctcatccattctttcccttccttccacaaaacaacacatttacaacaatacaacctaagccatctttaaaataattgtataaacctgcttatgtttccctagtgagtaaaatgcttattttaaatgggaattataagacactccctctctggaatccttcaggcaaatgccactttgtaatgagacaatttatctcttaacgtaactgaagcttgcagacaatagattcaaaactggctaatgaacttgattcttcttcaattctttggaggttggtgtatgagtcaccttgggctgccgtaggaagataccacaggctggcggcttaaacaacagaaacttatttctcacagttctggagactagaaatccatggtcaaagtgctggaaaatttgatttttagtgagagctgtcttcctgttttggagatggctaccttctcgctgtgtcctcacatgacctttcttctgtgtgagcactgaatgacagagcgttctggtgtctgttcctcttcttatatgggcacaagccctgctggattagggtctcatccttatgacctcatttaccttaatgacctccataaaggccttatctccaaatacagtcacattagatgtcaggcttcaatatatgagggacacaattcagtccctaacagttgattgcaacattatgtccaaaatacaaatatatatttagtgtttatctgtgtatttttaaatgacttgtgcattatttatgcctggtcagccaggtacccggaggcttggtcatgatcaatttcctgcattagtcactactgtataagcccacaaagaaagggtctgaattcttcaaaccgtcttgaagctactaactgaaactcattctgatttacatgtaattaaatgaggtaggacagattcaattttgttgtgacctccaaatcgtggggatgaatcatcccttccttctctgttattgatgtatgtggaagcctgcctaggacagggagaaactcaaacccttaactctctccttttaataagtccctctttttacttcccactgtgtctattgtggatggaaggcagtcgtaaggcttacttttactttacccacaggtaataggcattgtgatagagacccatcatccattcgaccctcagtgatttgtctaagccaattatgataattctagctccctccttgattaggtaaagaatgtccatgtgactcgactctggcctttgggatgtaaggggaagtctgctgaaaggcttctgggaattatttttaccattcttaagagagctagaagaacaggtgcatagggtcttgactgaatacgaggctagcagccatctttttgcccgtttaattatgaaactaatgcagagagcagagcagaatgatagaattaacctgtttctccgataaatttttaagccactgaattggtcaatcttatcactcactctatatctgagtctcctgttatgagggagatcataaacttcacggtttctattacttgcagccaaatgtatctaaaaaaatacaccataaatggtgagtctgtcagatatacatgtcaactcatttagaggataaaaaaatctgcttctagcttcacctctaggactagaaccattattccttcatcagattatatccttcaagggcttcctgttgctcctaggatgttcttaacatggctcataaagcctagcatagcattgactctgccccctatttttcatatgctaacgagccacacgtgccttacttaatgccttcagtgaatctggctgcatcctagagtagctcctttgcacaagttgttccttctcctctcatggctcctgccacctaattcattttcttagctcttagtccttttaaaatttcaatgacaatgctgctttttcagcgctaactccctagaccaggtcaggttcccttactaagtcctcatagcttcctggagttttatcctcttagccctttctgagtttgggatgatatatttgtatgactatttgtatatttgcatttcttgataactagattacaagcttcaaagggtgaagtccacgctttgtctgattagtaatatatcctctatacacagtgcctgtcttagtctgctcaagctgccataacaaacaccacagactgggtggcttaaacaacagaaatttatttctcatagttctggaagctagaaatctgagatcaaggttttggcagttttgttttattctgagtcctctctccttggcttgtagatgacaacacgtgtcctcacatggtctttcctctgtgcatgcacatccctggtgtctgtgtccaaatttaatcttttcataaggacaccatattataaggatactagtcacattggtttagggcccactctaaagtcttcatgttaaatgaaacacctctttgaagaatttattacattctgagatactaggagttagggattcagcatatgaattttgagggaacacacttcagtccatcacagtgcctaatagagtgcttctgtatagaaggaacgcatcaaataactacttgttgactgaatgaacacatgaatgggattttccttatgtaacataattaaagccaaccactatgctcattgcttgcctatgaatacagtctggtaagtatgcatccctcttagagtgagaaatccagaaataagtaaagcagtctacttattatttgccttctaggagagcggtgattcaaaattttcatgtgacttcaaaccccatgatctttctgtctttccactatcccacctttagatggagacaattgaaatgagctatgagtatggctggtgaagaaaggaaaagcaatatatcaattttccattttccatggtatttgttgcaacaaacatattcattgtaaagacctgtttaaaaaaattttttatgcatactatctaggagcagttggataattttgacattcatttagcaagtttttattgaccatcttccatgaactagatactggatcaggcactggagataaaaagtgaatgatttattatactttcttttaagatttatatagcctagatgaggaagacagacaagtaaagagaaaaatacttctaagttttttaaatgctgagagaatagaaattacaggatatcatggaagcacatgtaaagactacctgacacaatctgggacgtatttgttatgactgttttggttgcaagtggtagaaaatccaccctgaagtggcctttaaaaaatggatttattaggttcagtatttgaaaagtctggggctacagtgcttttcaacacattggattcagagctcagtgtcactggccctgaatttctctccatctctgggttttgcttagttcatgtccatgtgttagtttctctttcacgcttcagaggtggactcaagcagcagcagctgcagtctcacatactctcatttataagtctacggcaaagagaggccctcttttatagtaaccatcacagacatcagattattcttactaagttagctcaggtcacatgtctgccactaagttaaccattatggccagggtcatttgatgaactgacccacttagcactcaggtgcccagtcaacctatggctgaaaatggggaagcattgaattccaaaagcaaattgcaagaatgttcatctgaccattctatgagtatttattgagcacctgttatgatcaggatccattctaggtgttgaggagacagcagggaccaaaacagatccctgatttcatgaatcttatattctagtggggaaagagagtgataaataagtgcatacataagtaaaaatgcagtacaccagatagacataaatgttatacactaaaatagaggtgggcaagaggtatagggagtacagtggtgttgggcagaggacttgctgttttagagaggggccatgaatggatgctctgataaggagatctgcagtaaaagaatccacttatgcagtgatttgagtaaagaagagcagttcagagagaagaaagatcaaggccatgacctgggagcatgtttgctatgtttagagaaagaagggaggcctgtgggcctgtcagagggaacaataatgagagagggaggggacgatatcagattggtggagaaaagaccaatggtatcttgagattaaagatgttggcttttctcttagtgaaatgggagccagtggagggttttggggaaaggaatgacacgtttgatttgtgttttaacagaataattcttgcaattgtttgaatcatggactttggatagataaaggagtaggtggatcaattgagagactactaacataatccaggcaagagatcatcttgacaaataacacctttgcctaaagtgttatggttgaggtgtggaaaagtggtctgatatgagatatattttgaaagctgagctaacaaggacttgctgacagatatgaggtgtgtgagtaaaaataggaattatggatgattccaaggtttttttccctgaccaactagaaaaatggaattgaattttactgagatggacaatagtataggaaatcaggctttggggagaagatcaggaacctagttttagacatgataattttgaaatgctactagcaattcaactggagatatcaagttggttgttggatatattagtccagaccacaaggctgagtactgggtggggttaaaagtctatgcattgtagcacacagatgttagttaagccaggagactcgataaggtcccttagacagtgaatatagatgagaagagaagagaaatgagaacagaggcttgaaaaatctaacagtaagaaggcaagttgatgagaaggaatagacaaaggatactaagaagggttggcttgtagggcagaaggagaaatgagaaaatgtgatgtctaaaattctaaacaaagaaaagccattcagggtgtaggagtgatcagtaatatttctgagaggtccagtaagacaatgatggagaattgaccattggatttggcaacatgtaggtccctggtaatgaagaacaaatggttggttggtagaatcaatgattgaatgatggattcagtagaattgtgggaataaatctcttatttgcagggatttaagggagcaatgggagggaggaattcagataatgtatatagaccacatcttcaaggagttttttttgtaaagagatgcagagaatcgtagtagttgaagagagagaggtgtcatgagagggttgtttattaagatggtgaaaataatgtgttttatgcttatgaaaataatccagtaaaaaggaaaatttgatgattccacagaaaggaaacaattgatggagcactgtccttgaaaaggcaggaggcaatggggtagatccaagaagttggctttggataagaatatggatagttcctctgtaataatatgcatgaaggacaaggcaggatatatgggcacagatgtaggtaggggatgaatgtgtggctgggagcctggatgttttattcttattacttgagtatttgtactactgtaggaaacataggcattaagttataatgaggatggggcaatacaggctagatgttgcaggagagagaaaaaggtacgaaattgttttcactgggagagtgggagaatgactggccccagcaaatataatagtattgttgggtgtctgtaagagccctgttgggtcatagatacatcaaacagcatagttgtgtgttttcctccaggcactttcagctatgaaaatgcaggtatagactgggtggaaagttggatttatccagcagtggagttttccaggtactaagaaagtagagattagtggggaaaggtaggtgcatgcaaataaataattttaatagtggcccatggaatataaactgagtcaagaggaaagtgaggacatgctatttttggaagaaagaaacctgtattctggaaagagcagtaacaagtttctattgcaaaactcatctttactgggctttgcatccaatgttacatgtgatcataaagcttggcagtagactgatacacacacacatcatatcaaatctgaatatctctaaattatataaaagtgtcattctataatgtctcacaacaactgagaatactcaaaattgaaacatttgttcattcatttattcaaagtcatagcagcataaataatatgaatgctaaaattgcatgcatttttggagaaactgagttttgaaaacaagcactttctcttgtaactaattacactaaatttggggaatattcaataaatcaggattaacaaggttttatggattttttttctggaacagtaaggaaaataactgatatccatagagcatggtagaaagtgacacatgttgacagggaggtccagattaaacaatctgatgattcagagaaggagaaattacttcaaagggaaaggtgatatcaatcagaaaaaaaagagagagaaaagtgatacagcttcatggtatgaaatttaataattgtctgaataatcttgtttcaagccaattaaacttgatttgactagagaatttagagattttagcaactataataaattgaccacttcattattttttcaacttccttccggtatttcttcttggactaaagagagaggaaaactaaaatttcccaactcattttcaccaagtttttggatatgattaagaatccattaatccaaagcaattacacaggatttgaatacagagctgagctgaagtggagagagaagcaggtggtgggacatccaccttgcttgagtgggtcgcagcggaggtggcatggttctggagctggaagctgtcatggcagcgtcctgatttaacagcttccttctctcgcagcccctgaggttaggagaggcagaaactcccatgttgttttagatttattatcactttgagagttgttcctcttacttgttttatcctgcttcccaagaattctgaaagtcattcaatacccagtaataaatcactttctgttcaaactagttagaatggattctgttctctgcaacagaatcccaatggaaacagagaaataaccttataaagtcagaaacttgatctgacctatgagtgccccatacatcacattcaccttgaatctattctagaaaggcacattcctgggatacattctctgactgatgcaaaagggactgaggagtctttatttttaactagtgcccatatatgattctgacatagccaatccctagagcaacgccatctgatatcccttgatccagagaaattattcagagggcttaatgaaatttgatattaaaatgtgcctgctattattctgtggtatggattaagtgaatttgtaggtgaagaagaatcagttatggccaattcccaaatctctggcaatataagtgtagttaattcccaactcattgacaacttaaatgcctgagcactcatacactcacatacatagcctaaataccttttaatatttgttttgaggtaaagttagttttctggattcaaaaaaatcataattcagggtaattagtacctatatttgactttcactttcaagatagaactgaatgtatagtatctagtgctctgtgctgagcataaatttaatggaaaggaagtttctagtcttgttttgtttttccactaaggaaatttcatcctcttatcaaaaatagcagcttgaaaaaaattaatgacttttcaatttttctctttcggttccccaattatcttctttccagggtggcttttttaggagtagaatttttaaattaaaaaatttaactaatcataatggtagatgtcactggaaatataaggaaaataatataagcattcaccataaaataattactgaacaaataaaaatgtttacttttgtctacatgcttgtatgtattgctctaacagctttgatcacagcgatgaagacattttttattcttaatgctatataatagaatatcccatttaccaaccatttattatgttctaggtaataatctaaatacattaaatatattaaataatttttgttcccatcaatactatggggatgtctctattactctcttcatcttacaaatggggaaactgagtttcagaagttaagtaaggaacttttctaagaaagaatgtagacagattcagaagcctatgatatcatgtctcaatcttgttgctatatttatatagtcatgtttttaatatatgtcttacatcaaggaaattgttaagtacgtatcatataataagatttaaccatctgtgtactgaagatgatttatcttatcacctctgtcttcctagatgcattctgccgcagggaaaacttccatccaatttaacttgctaatattttaaataatattattaaaataaaaaattcagaagatgaagcaacagatcaaaaactatgaacattttgggggtcttaactggtatttccaaaataaattatacatgcacaagtagatctgaagtatttgattgtagctgtttctctaatttttgaccagactgataattaaactttaaaaaattcagcttgataaggagaaattggtacttcattgtgacttcaatttacattgtaattactagtgcagttggtctttttccgctttcagcaatcaataaatattttatggttgcttaccaatagtgttttctcatacagggcagcagcattaacagtagaaagaatataggtctttaagtagatagtgctgattacaggttctgtggtcttaggcctattacttaacttcattaaactcatttcctcaactgtaacttggggagaattataacttggaagggttattttcaagattcaagagaatgcttataaatcctctaatctgctacataaagaatactttaaaatagtagttgtcattattgttattacaattgaatatttgttcataatctctattcactggagttttgcaatttgagtaaattttatatatcatagatatcaggtgtttgttatattagatagaagaaaagagaaaatctgttttgaactaacaatggaaaaaagttaatattaattagaatttattcaaattgtttgtgatcagagagttaaatgcaaataagcataatacaattccccttacaatgcacagtaattttaaaatatatcaggctagagcttttataataaaaaaaataatgtaaacatatgtccgattatgtttcaaaatgcaaagttgactaaaaataagaatatttatatatggtaaaacatacaaaaattatactaatttttttgaagttattgaaacttaaggaacaaaattatgtcttttgcatatgcttttgaataaaataaagctggtagttggggtttcaataatatctttatagggaactttatagaatcaaattggatatacaaaaaacctcaaatttggtgatctgattacttcatcccaatagttttgcctgtcatgggagaaaagaaaccccaacgatttcaaaattacaattattttctattatcataacagaatttcaatggacagattttctttctttttatccacccaaatgtatgaaaactgtatgcatataaacatgctgattctatccttagcaaacttacaatattcatgaatctaaaatcactcctcttcatgtttagtccaataatgcctcttgttctctcaaagaaagcatcatatcccccatatgtaaacattgctttacaagccaatgccatatgctgacagatggcatgccatctgtggctcagttattaaaactaaatttcttggctatgttcaataaatataagatattcttatccatttttttccagaaatgtttagttttcaaccataggtttagcaagccaaaccacaaaactcaatgctatgtaataacttgggtaacaaaataagctttatgtcagactaaaactatatttttaggctaagatgttcagaagggaaaaaatagaaaaagataaatgtaaactaatttccttaagtattatacttttgatttggctcacctataagtattagacaggaaattttaaaaaactgtcctcagttctaggagctaagcagtggtgggtggggagcatgaaatacaaaatacttgaaatgttttacacattgctcaaactcaaaaatgcttgtcagtagttattttcttgctatgtcttcaagccttcaaattagtcattttttttcacattttcagtgtcaaataagactttgaagagaacatgaaaaatataagtaataaatttctactcatcataaagtgacaagttttgttggaaggatagaaaatgaagaatggcaatgtgcatcactggaagtgtttaacaaggtaggtttcataaacagaactttgataactggtgatctcaggagaaagagatttgtaggcaaagaaagtgagaaaaaagagtgatgtttgaaggcttttttttaaaaaaaatcaagagatcttgtgtgtgaaagacttccatatccatatccatgattcattctccttccttttaccatcttggtcctggtgactgaacgtggacatccttctccctccctttctttctctctatctttctcttcatctgttttccttttgtattgtcttccctccttttaaaaatgtatttatttagatctaagtgatgtataacattgtataaatttaaggtatacaatgttttggtttcatacattaacatattgcaatatgattaccaccgtagtgttagctaacaactctatcatgtcacataattatcatttcttttttgtagtgagaacaattcaaatctattctctcagaaactttgaggtttataatacagtactattgactataatcactatgctctgcattagatctccagaacttgatttatctagtagttgcaagtttatatcctttgacccacatctcctcaattcccccatcccccagcccctggtaaccatcattctactctctgtttttatgagtttagcttttctagattccccatataagtggtatcatacagtatttgtctttctctgtcagacattgcacttaacataatgccctcaacgaccatccatgttgtcacaaatggcaggatttccttctttctcgtgactgaataatatatcatacaacataatatacaatgtaacaaggtacaactacattttattatatatgtatatacactatacatatatatacactatatatatatatatatatatatatatatatatacaccacatctttcgtttttgtttttgttgaggaaaatttgccctgagctaacatctgttgccaatcttcctctttttgtatgtgagtcactgccacagcatggccactgctagacaagtgacgtaggtctgcacccgggaaccaaagttgggccgccaaagtggagcatgctgaacttaaccactaggccactggggctggtccaataccacatcttctttatccattcatctgtttatggacacttaggttgtttctatatcttggctgttgtgaataatgctgcaatgtctttcttcctgtgtataaatagttatatagggccagtcatggggccaggtattgagtgatcaacagacatagcccctactttcatgaattttataatataatggtaaacactggcaactgaagagataagtaaaattgcatcaaagtagcacaattgtgggggtatctttgtggggtgggtggggaaaaagtagggaagagttcttagaaagcaatatccaaattatgaattattctctacctactcccttctcttctaaaactcttggattgtggagtaaatgacaaactttgaccttaatttcagttgggtgttttttgtttgtttgttttttgaggtttgcaaggacatctctctttcttcctctcctatcatctacgtttttcctttatgacaggactgcacactgaatgggagcaaggatcttctttctgtctcattctctgttaagaaaaaatcctttaggcatacaatggctttaagtggataaacactattctggaagcaaacaaagcatggaaataatactctaggcaattgaccaccataaatattgtctaacttcttggcatacaaaaacaatcaccacctctctacctttgagttgcatatcttgtcttgctttgtaaaaactcatttatatttataaacataaccttgtctgtctcatcaggaaaactctgtgtgctaggctagactgtaacagctctcttacccaaaaagagcctgaaaattcttaagtttatatggctattcatattctgacagcaaacacaggatctctggatcaaagaacaaaccatttgtctatttattgctcagagcacctcagtacctgtttctcatgtttctgttcctactaagcatgggccagccattcacctccatgtgtactaggattgtaccacatgagaggaacccccaaactatgagattaagaactcatataggaaggctggtacatccttccctgtggagagagatctttactctagaatgtaaacaactcctcgccaggaagagggtgggaaaggtctctacaccggcctgtaagcaaatggctctgggcaagagaagtctctaaatctttccggagcaatatactacctataacttctaaggcactcttgtcattcaatcattgtttaacaaagattgccagccttttttgctcagaaaggccacagcatagagaaacatggtaatattcattagaagttgccttccaacaggaattaaaaagtgatttatatgacattaatataatggtgatcaatggtaaatttgaaactaaaatctggtctcccaacttctcatgccgtgatctgatcttgacactatatcacacatgtattttgtgaccttataggagacagagagactctgtgattgatgcaactgagtttttggctagtattcctatcattcctaccaatttggatctgatataacagagagatcgaagttgcaccaatgaagaaaagaagggaaagtagttaattgcagttggagcagtactttgaaaatgttaaaattaatgtatatattaaggaatatatacagagaataaaacaagagtcaatactgtctaacacaataatgattaggattaagtttatactccaaacagagaaggtcagtataaaatggaaaataatacagcaatctcacttacaaacacaggaagaaaatccctaaataaagttaggaaactgtggtaaaaagaatttaagatggccctcaagattctcattttgttttagtttctcctcttgagtgtgaattggttctgtgaatatgagagtggatagcactctcatgcttatgtaacaacatacagcaatgataagagaattttgtggacataattacagcccctaatcagtttactttgagttaatcaaaaggcaaatcatcccaggagggcctgatctaatcaggggagctctcacatgagagagtcgcctgctggcttggagtagtaagtctctaagagctgaaagtggtcccagccaacagatagagaaaaaatgggacattggtcttaaagccacgtacaaatgaattctgcctacaaccaatgagtttgacagagaacctcaagtctcagctgagatcacagccctgattaacactttgatttcagcctggtaaaccctgagcagaaggcccagctaacatatctggactgactcatggaaatggaaactatgaaataaaaaaagtgtgtgttgttttaagccactatgtttgtggtcatttgttatgcagtaatagaaaactaataaacaacccaaatccagaaatgtataaaataaatattataatcatgtagggtaagaagtaatcagtattagattaaaagagatttaataccatattaaattaatttaataccatatttaagttaataccatattaaattaaaagagaaaaatcatataatcatatctataaatgcaaagaaaacttaataaaattctatgtatacccatgataaaaactatgaacactaggaataggagagatgcctcctatcactgcctgtatacttatagtagataaattagttaatacattaacaaaagatatagaaatcagagatgtaaagtttaaaataagaaaagatgaaactattacttgcaaatgatatgactgtgaatatcagaaatcctaaaattttatggacaaatggttgtaattaataaaacaattcaacaaatttagagaatataagaacaatatacaaaaatctcttataattcaatgcacaagcaaaaagcaattataaaatgtacaaaatgtacaaaataaaccacaccatttgtaccagcaacaaaactgtgaggttatgggcaataaaactaacaaaatatgaaaactgaaagacaaaagacctaaataaatggagagatgggtcactttcttggaagaaaacttcaatattataaacatggcaattatctacttactaatctgtgcatttgttttggtttcaatcaaaatctcccaaaagtttctcatgaaatctgaaacactgactatagaattgaatataagagttagggcttaaaaatagataagaaattcttaaggaagaggagggagggtatggctctgcagattcttagttgttgaaactaaataattaaaggaagtggctatttgcacaagtacagaaaaacagagcaaataagcaaaacagagttttgaagaccagaaatttatatgagtgcttggtacatgaattaaaaataatattagaaatcatatcagaaggaatcaaaaatttataaataacgctgagacaactgactatcccaacagaaaattaaaccaaattctcacatcagtctagacacacaaatatatttcatacgcgttaaagatgatgtctaaatcaaaattataaagaatttggaatacaatacagaggctatctttattagaatgagaaatgatttctaagaaaaatgagttataatctataaaataacactgataattttgattatattacactaacagtaataataaactgctatgcaatgaaacatatcatgaagtttcaagaaatgccgtagactggagaagaggcttataacgtgcataggtaagattagtaatcacaatatataaagaatttctaccaatcaataagaaaagaacattgaaggtgcccataatctactaaggcagaccaatttcacctctagattttctaaggtagagaaattctcacagcacatgtacacaagagaatatgtgtaaagatattcgttgtaatactgcttgtaaaaatagtgtaacagtctttcacaggacaaatggatacatcacaagaactaagactaggaaagaagcaaccaaatgattcctatatataaaacaatgcataaatgaattatagatggataaatatgtggtaaaattacatatattataggggcaatgaacaccaatttcaaaataacggttacctctgcagagaaatgagggttataataaggactagatggagctgtatctgtagctgtatctgtaccactgggttccttgagagagatgagtgcaggagaggaagggagagaggaggaggggtggcggagagcggaggggagaacagagagaaaatatggcactaggtcaacatctattagtacataggtatttctattattgttttctcaactttttgtacatgtagaaaatttcatgattaaaaataaatcttggggctggcccagtggctcagtggttaagtttgcacgttccatttcagctgcctggcgttcactggtttggatcccgggtgtggacctacacactgcttgtcaagccatgctgtggcaggtgtcccacagataaagtcgagaaagatgagcatggatgttagttcagggccagtcttcctcagcaaaaagaggaggattgatggcagatgttagcttagggctaaccttcctcaaaaaaaaaaaaaaaagtgagttacaggagacagagtcagaaaacccagcttagaagtgatattttcttctagcaaatgttaaagaacaattagggaagaccaatggcctagtttattggctttctatcattttaggccatgactcagaacaaaagaggcatttcacctattgacccaatatatgcaaagttttacaaaacacttcttagccttcctatgctagatacactagattttctttcgtttgttttgttttgctttcttttgttttccagtctatgtttctgtgctgtgctggctgtgctatgcatgctattctgtcatttttttcctcctttatttcatttttaagaatgccaatcctgaccagttatattgactttgagacctactagtggatcatggcccaatgtttgaaacatagtgttctagtgccaagaaaaagacatttgaattacatctgcaatttaattgtgagtttgacattgtctgtaaaatctgtaaaactcagctaactacgttggcttagtttcatcacaggagaaatggaactgacagtggcatagggctccttcgtttaattttttactgaatatctaccatgtgccagatccttttcaaatactgaggggatcaaggtagctaatgtttattgaggatgcttttcattagtgaaaggacaatactattttcttttttaccaaaaaaaaatagaaattgagtaaaatgtagacagcaaaatatggaatcagtctcaattacatgaaaggatttttgtaagacctggaggtttcaaatgcaggcctctggagaatgtcaaacatacgaacatgggaaataaaacgttttacagaaaaacatttcatggtatacattaaatatgaattgttctctttaattctctggtgaataaaaatgtggcaacactttcaaaaatcaaattaaatcttactcccagctctcatttgctagaagggggagcaatttaacctaatttgtgctttgggggacctctcaacctctcctttcatattccttaagtcactttcagggtgagatgcttgtggtgtctagaaaataggagaagggacttcagtcttcagttcattgtgcttgctgctgaggtgccctgtggtccattcgacccctcctcccctttgccaaactggggcaaggagactctttcttcagctcttagcatcatagcccttggcaccacgaacctcagtgtctatacatcaactgatcagaggccttagggtggtatggatctccacatctatccctaccccaactcataacaccatagaaacacacaaacacgcaccagatcttctccacctctgtcggccttggaagcggcctgccagctgctgccaacccagtcttcctactctgcaaatcccagagccccaccccaccccacccccttgagactagtacaatttagttcctttgaaaaatcaaacctcttaaatgtggcatgagggaaaagttcttcagagccctactagtccttgggtgtatgtgaaaaggacaaatgaataagtaattcttatttttcctgattatttcacagctgcaaaacaaaacacgaattaattttcaataaactattctgaaacattcgtgtgatatataggtggaaacaactttagaacacagtgtttccacatgtaacatttagtgaagaaaattttttccttttaaaaatagtttattttaccatttctaatcatgtactctgatctaataagaaacagggactcaaattaacatattattagttgatatatttatctattaactactcagattgtcacgctaaatctcccaatatgaagttaatcctgtcaattttttctttatagagtatcaggtgggtaaatattgaaactttttatattttccttgtgattatacattttatcataattcagaggtctttgtatccataataaggtgctttgtctattttatctgtgagaaatatagctatatttgctatcttttggttcaaatttacctgatatgtatttatagtctgtgacttttccatgtggttttcaatgttgttatactttaagtatgtgccttgtaaataaccacaaatttcaaaatccaatttgacgggctctgccactagtaaaaggagtctattcacatttttttaatttacagatttacttccatcattatattttatgctttctaattactctgactcgatttttttcttttgtgaggaagattggccctgagctaatatctgttgccaatcttcctctttttgcttgaggaatagtcaccctgagctaacaatctgtgctaatcttcctctattttgtatgtgggtcgttgccacagtatggcttgatgagcagtgtgtaggtctgtgtccaggatccgaacctgcaaacccagggccgctgcagcagagcacgtgaacttaaccattacaccactgggtcagccccattactttgatattttaatgcttacccatctttattttttccttctatggctgcttgaatttttttttttattcaatcttttcctcaaatagtttggaccttttcaacttctatttttatgattaccttaattataataaatttacataataaagtcttaggttaatcaacatctctagccttctcctgaataatataagaaacataagagtgcattaattatggtccattttcttaaatttcttccaaattatttattttattacaatctcacatgatgaatattcatttagatttacccatacatataagcatttagtttcatatcttttttcccttacaagttgctcattgtttcctgggttaaatttctatcattttgaaggatactcctgtcaaagcattgttcaaaaaatgataaaaaaaaaatcctagaaaatagtgagcatgggcaaagttttatttaactcattgataacagcagaatattatggctggttcaagagacaattctagaaactgggatatacggacagtgaggaacaaggaaggttgaggtaagaatgctatgttagatgcaaagctattcattgtgctgcacgacaacaaaaccataacctttgtgacatcttctctaatgaacaaaaacaaaaagtcaccacacttgaacagttttacaggattgtaaaatgtctgaacattaatcaactttgcaaacagtattacattcttctagtcagctgacctttaggttagctggttagaaagtgttcttgctcacccttcattaacaactcagttcatccttcactttatatccaaattttggataatctttcttaccatctcaaaaatttttttactaaagttattaagatggtcaattctcttggcttttgggggggggaggggaaagaattctgaatactatatctttttgccttcattctgaatagcttacagggcataaaattctagattgacagtattttctcttatctttcaaaacatgttccactgctcttactgattttctggctctctgttcatgggtcttttgtagtaatttgttgtctgtttttctggctgcttttaagatctcattgtctttggtgttctacagcttcaatgtaatatttttaggtattgatttcaatttattttattgtgagctcagctatggatttaaaaggaaatatatttgtctgatactgctaggtcttttttagatggaggatttttaggatgtgttctctgcaatatttccagaaatggcagtcctaggaatgcattctcaggacatttgttttgcaacatatgctataataaaatgagggattaaaccaagaggaagtcattggttccttataaaagacaaacacagtaataataataataataatacccccagacaatagaggcaaaggaggaaattccaggatgacaggtacacagcaactggagggcaatcagaccaaactggagcagtgagaacgggggttccagcaggaatgatgcaaaaataaataaataaaaggcacacagacaaataatgaaaatgtcaggttacctgctgtgttcaatcatgtgaaaaatagtattcagagggattttgctattgtgttaggaaggatgaaacacgttcaatgggaaaaaaagctgttattatctctaacaaaaacaagaagatgaatataaaaggaaaggtaatcacaggatattactagtctcaggtatagataatactgatctaatccataagggagttatgaatatcagcgcgtccagaagttctatttgtattggagggacagaggtagtggatatgagtgtgtgtgtgaatatgtttatgtggaagaagggaaaaacaatgatctgtgagtgccaaaaccatacattttttcctaagaattgagtagaaaatttctaaaattgatacaataaaaaaaccctgatatgcctattattcagaaaacacaggggcgagtggaagctggttttataggtggagagcaatgggttgggaaacatacatgtacaagttctaagtgaatgagacttcactatttatgcctgagaaatcactaaaaaaacataatctttcctaagaagaatttttataatggctgcaactgagaaaaataaatatatttatttacctagtgggtaatgattgtgaagagggggagaatgaaggagaactcaagagatggaagatgaacttaaacgtctgcaaattggcagaaacaatatgacctatggaattatggccacggggttgtattcgcaagaaggctattctggaggtgaagaaggcggcaggcattgtggcaaatacaggagaactgagatgtcagtagaggagaagggcctggcagccgcagttttggcacttcctgtcttcacagcacatgcacatgagcataagactgagcgtctctgagcctcagtttctgttttcttgaaggagaaggaagaatatggataaataataattagataaatacggataattaatagagaggaataaccattatgaaaattatgtgagatagtaaatataaaaaattatttataatctctgaagatctctagaaaatgtcagcttttcctagctattaatggtgactaagagtattttatctttcacttatttattttgcagataagattcaaacacgttaaaacttaattttgcaaagaaggaagacaattgcaatccttcagtaggaaggtatgtcaataggggaaacactcaaccaaagtttaagggcagtttaatttctcgtagacagagagtaaatgttgatagaactaagtgttgcttttgtcttaatttcagaaaatgttattttgctcccgaaaggaaactagtacggaggaattagtggtgcaaaaacaagatttggcttggttgttgaaaagtagttttgaatcctagaaagagctgaggcagttattctgtttgatgtccttgcatagaaatgaaatagagtcgtggctgaccttttcagtctgaaaatatttgagtgtttgctaactaatttattaactcttttcacatctgctcctcacgtgattaggtgcagattattttcatgacttcaccaaagagcattagatgcttgctttccttcttgcctggaaattgaagttcagcttctatttgttaatctcatgaaaatttggtctaagaactcgcagagtttgtcttgacaaagctctattatccaagcagatggtccttcctcacgcaggctttccttgcagaatctattgtccctctaacaggttgagaggttttgctctagaacagacaacatagttagaacctggaggctgaaaggtatttttatttccaacttattttgtcttagttataccgagcctcattattttgtcttatttatattttgtcatgacttatatctggattgtggaaaatcagtgaaaccagcctttcaagtaaagtcaatactagttttctatctcctagaaatagagcagtggtttaagaaatatttcttttttcctctcctacttaacatatttcttttttctttttgttttttactcaaggactttctcttaagatttaaaaatctgaacttttgaagaaaattctcacaggcttgggagatgataaaaatatactaatatcaaataactgctcccactgagaacaatgaatcagattctcattttatgtgactcttgggcaatttgcccactgtgtcgcccatcttgggattctagcccaggtggtagctctaattatccccattttttacttcctggcaaggaaaactctttctaattatataataattctgattcattctgaaataaatttcagcatgttatattttgccatcactgaaagctatgtgttaattccattttaattgtctattcaggaggctctgttaaaaccagtgaatatcattgggagcagaaacttacggaatatggattggaatcaaatgattaaattcttaaggaacatattagtttttgagttttattacatccttatttaaaaatacgttataagtacatgagggtagataccatatggtttttgttcaccactgtactttcaccgcttaacaatttgcctagtacatatagtacatgcttattaaatatttgtaaagctccttagtgaatgaatcagtggatgtacctggatatgcatattatatgcatttatgcatataaatgcataaaatgtcagagtagaagggtatcttctgcctcatgctggtggcaaaaatgtgtcctaaatgttttaggcaataccagaataaaataatattaaaaaagaacaaactcttacctggccttatctatcccaaacagtagtgaaactaactatttaagataagaagtgatgtagcaaggaaaattgtgccaactaggctcttctgaagtgacatttcctgcagtatgcaggtggttaatgtgatctgatagaaaaaaagcatttttaaaaagcatggcctgactgcacaggtttctagcacaattatttgaagagatttcagtttgaagcaattcactctgaaactagttgaaagctttggcagaacacatttcatatagaagtatttatataaacctgtttccatagtatctaggctctctaaagccttgtcttaacagaagacaaataaaatattcaagaatatccaggtgatttccgtcagtatatattcactaaacacatttggcgagcatcgtgctattcctgggaatccaggaagataaagacacagaggaagataaagttctccaataaaggaaccctcatgataaccaaggggcaggaaagagatgtcttaagataataattacaatatggtgctagaactaagacttcaattcctccactgccacagaactaccatctaggaaagagggactgaacaaaaggtatccatcagtgatgtggcagtccatggtaggagacagttccattctctgagagaatggctttttgtaggagtgcaaatagagatggggaatcttctgggcagagaatggtagacagagcctttagaagcacagaggatagtaaaaataaatgcacagaaatgataacgtgcatcaagtgtttagaataaatgagttaatagatttagtcccttttttcatataaatagcttataaaaactgcttaaacccttaggtcttgttttcactgactgtggccgatcatatttctccattcaaatagcataaatattacctctatcctgtgagacagttgctttaagagagcatccaacttgtctctggatattccaacctccaggaataatcatgcagactacagaggggatggtccagttcatttcttggccatgaaaagacattacatattagtgcccatgtgtttatgttctgctgaatacaagtagtcaatactattcagcttgcctaagtcctaagtagctggatagtgtagatatatacatgcctcccataagctggagtcccaggaaagctggtggtgtaattcagcccaagtctgaaaacctgagaaccaggggagcagatgatgtaaatcctagttcaagagttcctccttcctccaccttttgttatagtcagtccctcaatggattggatgatgcccacccacactgggcagggcagtctactttactcactccaccgattcaaatgctagtctcatctagaaacaccctcacagacacacccagaaacaatgtttaagctgggcacctgtgactcactcaagttgacacataaaattaaccatcacagagggagaagaaagaagaaccacttaccattttgttcaatccacatgactctaagtgatagatgggatattttctctactgataaaacattcaaatcagtgagagatcactggtcttacctaaacatcatagctggccacagtgaaagtaggactactataccaaaacttatctttcatccagagcttttcctgctatctgtcactttccctcacagagctgtgagtatattaatgtttgtatgttctgtgaagtgtcatctgccatctgtgacttacgtctcggtatatcacagtctgtatgacacctttgctcaaaatgagtcactgcatctttgattactatacaccaacttggcctgcagccatattcctcaacatcttacaactatgccacattgccttattcggggtttcaaaaactcagggagaaaattcttaccatagaattccttttagctctgtcttttagcttttcaatggtatctgcggagttccaaaactgctgggtaaagcttttgtaaatttaagtttttcactgaagtctctcaaaaacttacctagctcctaagctctacaaactcctttgctgatattcaaggctttctgtgatctgaccacaactgacttctactctcttttttaccattacgcctcaatgtgaacctcatgtgccattcagataactcagctcctggccattccgcacatatgccatgggctttcgtacctctgcgtctttctgcacatgggctcctcatcattccctccccagtttactcctccctctgcttgtggccattgatccttatccttccagttgctcagacctaacactctggaatcatccttgattttctgtctttcataccccatgtcaaatccatcagcatatcctgttggctttactttccagaatatttctagaaaccaatgctttttcggtacttgtgctattattctgatccactgtatcattatttctcctttgtatttccaaagtcagccaaatgactagtctcttagcttcagaccttatcctccttcagtctatcaggatgagaatagccatcataaatgtgttaaggcatatggcatatcccagtacttcgccactccctttagtcccgaaatatttaagatggcctccaaggctctgaaatacttgtttctcatgtctgtcaaatttcacttgtaaaacacttcctcttaatcaatctgctccagtcatactggcttccgctctatttctcaaacattcaggcatgctcccatctcaaggcctttgtccttgctgttccctctgcctgaaatgcttacccccccaatatccacatggttcactcttacctctgtgactgcctagcacggcgtttcccgacctattttaaatgtatctcctatcagtacttcctgccttccttcctgccgtattttgctccatgatgcatactacaagctaactctgaaaaaaaatatggtttatatatttatttttttaatgtttgcctcccccatgtaaatgtgagccacccgacgacagtaatttttgcctgttttgttcactgttctttccccagtgcatatgagtctacatcacatattagaaattcaataaaagactgaatgcataggagttttttcttctagccaaggtgaagtaacaggaattggatttacccttctagctaaaacaacaataaaacagaaaaagatatgaaaaagcagtttactggatatcaacaacatagcatagtgatcccttagagacaggaaacaacaagctgtcttacaatttcgccgatttactgcctttgcagagtcttccagcatggcacagggaagagaaatatagagggtgctggtgaactcttttgagtctcaggatggagctgagaattcagggagcacaaggaggctagaattttcaagacagagtacctgagggagagggcagcacacatagagaaccctgacattgcagaggggtcctctcaagtattcacgtgagtactgttctgttggtcctgaccctagtgatggtagtgccctcggtcaggaatgcctgtggtgcttgcctgggtacacatcactcttagggagcctcatagacattttccccactggggcctctatttatggctgggccagctcttatggatcttattacgatcacaggatgtacttcagcaagaaaccatcagggaactttgaggaacaagaattattacttacaggttctggagggtacatggcaagcccaagggccacacagcaaggtcacagagagagagagggagagagggcatgcagacctggggctctgcctttattagagttcaagggtgaggagtctagggtcctgtgggttcactctttattgggtaatttaaagcataagagtagaaattagagtgagggaagggggaagtggggtcacttaagcaatcagttatctagggtacccaaagctttctgaaagagggatctgcatgggtatgagataggaaccagcctaaagagacagactcatctgcaaggccctggcctaacaagttaaggcccctaaacaattggcaagctaggagaatcagatagagacctccaagatccacattccacagctttgggaccttcccaggcttaagcatgcaccctagcatccaagagttgtctgaaggtgatcctagccccatcaccatactaaaaatcacacccaggggtgaagagccagcatgctaacatgcaacacatgtagtggcatgtcgtaaacagcgcaagtgtaagcacaacgccctctctacgtgccatgacaaggcacccctccccagcctttgcctaacaaaaagccccacaatcctgctccctattgaaggaatcacttgcccctttcctttcggaaatgactcccttgttcctcccttgggcacaagataataaacttttacttttctactcccgtttgttgcctctcttgatttctatcctcggggacaacaagaacccagtgcactggtaacagatagggacatcctaatttcttatctggttattttgctagctagtagttgagtcatacagctggcaatatgtgtattcaagatagatgtcttgaaagggatgccttggcaatcaaaagcttaatggtagacacttctacttcaaatgtcaatcagcacaggcatgtgaggaaactccctgaggccaaggaaataaccacccctaaaggactacaggtaagagtgtccaggatgcacacagttctgagaatacctgcacataaacagggttggaaaacgtcacaacgcacaaggcattgggtggagtactgttaaaaaagaagcaacaggccccaaatggcccccaggacagcaaagcaagactccactgcagtttccacctctcccaggaacgtgacctttaaacagtcagtctgaaatttcctgattagcgctggggaggttatcttcatgataaatgcccttgcccttccctccccccagcagaagatagtctggcctcaaacaatcctttctttttttttgctaatagcttctttgtctggcccatattctgcctctaaataccttccattttccacaactcaggtatctctctacttgctagatgcgatgctgcctgattcatgagttacttaataaagccaattagatcttcaaatttactcagttgaattttgttttttaacagtgcagaaacagttgcctcagtagtggggcaaaattagccctggataagcatggttgcagtctaactaacacatcttaaaagcaagacttgaaaatcagactgtttccaagtaactaaaatgcaactcagaaaaaagcccaagaatatttttaggaatacaaaaatatccagcacccaacaagttaacgttcatgatttctggcacgcatcaaaatttaccaggcatgcaaagacgcagaaaaaaatagcctccaattaggagaaaaatcaaacaattgaagttgacacagaattgacacagatgtgatgcttagtaaacaaggacgatatagtggctattattacaaacctttaaaaggaacctttgggggtggggttgataggtatattcattttgttcattgtgctgatggtttcaggaaagtgtacatttgtcaaaacatacgagtttatacatgttaaatatgtgcagtttattgtatgttggtcatacttcaattaaaaaaatgaatgaatgaatgaatgaatgaatgaagattcccttctattgaagctctcatcctttagtactcatattgttccattatgatatgttaccttctatattatagacaccaccagcatataaataataacatcacctatgatgtataccagtttatacaaagtttatgttcaattcatatttgacagatgaataaactaacaaaataactcagaagtgacaagagattttcacatgttggggtatatggggtaacaatttgggttcaaaacttatttggcttaaactaaaaagcctgaattatggcctatcaaacatacattgtacatctgcttaaccattagaggaagaatgcactctcttatgattagaatgcatacttcccctcctatgccctattggtaacgccctattggtaatgcctggatcagtccctttccttacatcatggtcatgttgacctgctaatttgcaactgaacacgtccttgaaattttgatgaaaatgtatcctgggtttgtttaatgtatgttctttattctaaaaagatataagactgtactgaaagccatgcttctccagaacaccttctaaggccttcctgggttataatcctcactttggcttgtaataaactcagcctaattttgatttataggttggttattgattatttgtatcgacagaagcatcagaatacagtgtaattgtcaagtgttgtacattttttctccctttttactgaacttctggcatacagttgcctagttgattattgtatcatcgacagagtcattttgaaacatgattatgaaattttggagctttctgcatgcttttcctcttcttgcaacattctttgcttcctcatcttttgcttagttcatgtctacttatcttttagtgttcaattcaaaaacagctacgaagagttaactcttttcatatccacaggccctctaggactagttcaactgaccccattttattaacagagtaattaagagtggtttttcaggagccgagatctcttgtccagttcaggcccattaagaccacctacccatcaactgggctggcgcagatgctctataagtgacatttttgatgtcaaggagctaaggactccaccctcagatcacggtcacattgccattccgtgaacatgcgtcttatgaggagagatgaagcttaactacacttgcacagatcatcaattacctcacttctccctacctccaatcgtctatctccacacgtcagaccgccctgctcttcatcccgtaaattttgccccaagccctggatcagggaaacagatcttggagctgatgcctcctgtcttgcagattgatctagcaataaagctgatttatttccccaaaagctgatactgtaacaattggccttttttatgcatattgggtggaggactccatctttgtatgataacattttgatccccaagactattttttgtcctccattaacatgttcttggtcacctggaattctttgtcgtactgaatcataactgaaattaaatgtctgtctaagtacccagttagggtttgtgtccctcactaaatgtaagttacatatacaaaaagactgtgacagtcaatatgtacctaataagtagttattagatgtgacaagatgttagactgaactatataatagatatgacacttggaagacacttgccacatgaagatgcagaagtccaagagaaatgttgagaagctcctcattcatagggaagatgatgaaaagagtggacattgggagaggatatgaggattgcgtaggaaagagctgtactgtggatttcatctcccaagggagaggtgatacttctttctaacttcaggcctggtgaaagggacttctaagaattactcagagaccttgatacatgatctttacagtggtgggactagttgtctggagtcacctcaaaagaagtcctttccaggaaggcttcctgctggacggaggggactctagagtgagaggctatggggtgtactagcaggggcggaagctaacgggtggtgaggtgcagccaggcgaagaagaggcagtgcctccatcaaaaagttgaaatttgaaagacacagcaaaggaggctctgaaaaacttaggaaaacatgtatcagaggaggaattttaggtatttacaatgtcaaagcatatagagccattttattgcaattccagtcaaataagaaatttcctaaccccttatttccacacactgttcccatttcaacttttatggtgtaggaaacaactcatgaatcaaggggagcagggggtctaaaagaggagagaaactgacaaatccccttcccaggtttcatttggctcctctccaacctgtcctagctgggagaaaggaaagtcttaccttgagatggagactgaagtgttgttgaatatattggactggtatcttaagttctaagggggagacaaaaataggctcttttgtttatattacccactgagtcttgtttttactttcacaagtgaatgaataaattaatcaatgaataagtgctccttggctctcctggttccctccttagacaaaactacttaactctaatctgatcatttcaattcaactgtagggcttatttgttccctcaacaaatgtttcaaatgatattgcttttgtgagagttgaagcattttaagggaactcacatgaaaatacctcatatcaatcaatttgggcatttaatattagaccatatatctgttataaattaagacaagatttaccaaatgaacaacagtttgtatcctgaattttcaattataattagcagtattttcagtatatgaatgattccaatagagaaaaatcttatatttttattgatgaggcagttattatggcacgtgacagaaaattaatagaaagtattacaagttatgacaatgaaaccaatcattttactgtactttagggaaaaaaagcaattcattgtttttttttttaatcctgttagaattctttgaagaataaacctccccatctgtttcattctcatagactagtaaatgtatatattctaaatttgtatgataaatgattatagtctctagaatcatctaaagcttagggaatatgtgttacaagagaaaatttggggctatagcttaatctctctggggctcaactatgaaatgaagacactgaattagaactaaacttgtgttatactgagttagaaggatgggcatggagctgaagttcctggtttacatcttgtcactaccactttctggattttccttctggggttagttacttaatctctttgtaccttactttcctcaactgtacattaccttcaacaggacatctcacaacctttaatatactatttattcatagactccccaagatagggaaatagcagtttgcatgttccaaatttatttaattaagaactccttttccccctaaagaatgatatgtattataatgcaatttggaagtgctggatttgatcatttgtaaggacaggcatttgtaaatacatctcaaggatcgatttcaaggtgatctaaaaaattctttatagttataagggaaaacttatatgtatactactttttaaaggaggaagctctcaaaggtccttaacaccccaacttacaccactcctgataaagcacttccatctgaaagctttttgaaatttctaagtatatgaagttaaaggaacagaggccctggagtgaatgatgtgtttggggcactgaaaataatttcacatatcacttataacatgtttggggactaagcaatgacttagaagcaggaacgaaacatcaaagagaatgaagagagaaaccccgtaggtgaagagttgttgtatgtagcacagaaggtagtttagattttatcattgagacaatgagaaggatatgaagacgtcagagcagggaattaacctagttttatctacatatgagaaagatcaatttggtactggggtggcagatgggctggagcaggagtattgttaataaagcagagggtaaaacgttctagttgctctgtcaccaattttggtgagttgtgacttgtacccactgccagagccgaggaaagaccaggaaacctaggaacggtgtctgtgaggtgaagcagaggcagaacccagaacccacgccaggaggcgcagggcccttgaacacaataatcctttcggccacgtaaacaccagctctgcaccaacaagcacagcttcacaagagtctcaataccaccaatactgtcagaaagagatgtcctgccttgtcctagctctgggagtccctcggcgccccctgtacctaaatcacgctcccggagatctctggcacattccgccctgaggttccagcggttcatatgctgaccacgccaggctccctcgtctcagaacctgcccccagagtgagtttccagctggcctactagacctactaaggtcggtgcttactttttccggaacaagacatcctgcggagttccagccccaggcctgcaggaaatggcaacctcagccagagcctctgcaatagcgggaccccctcccttcacaggcctcccagaatgcaatgggcaccaggtcaaaagaagtggtgggaaacaaggtgatttctgcctttcctgaagtgcgcaggcgcaggtgacgccgctcctttgtcggaggccacgcccactgttccttgacgggagcaggcagaaaggaggcagggcgcgttacaacgggctcttgcaacaacttgcagtgctttttcggccccaaaggtgatgtctctgtggctgggagcccgggggccaggtcccaaggcctccacctcccctcagtgaccggtcatggcgggcttgggggtagtgggggcagaagtattgaaggcctcggtgaggcaggcccgaggggtggacccgcgctctgcgcaggtgagacctagggcgatgatggattctggaccacggagacccggcggcgggggacaagggcgctgggtgaggacgcacagacatttgttcctgcactgcacttacagtgggagagtaaagtgagggaggggcatatcgtgaggggtgcgttattggaagtgatcatagcagcgtgaggggctgttacacgatgatcactgcagccattgcggccccctgccgctccgctcttgaggttcctgagcggtgattcttacggagttggcctcattgtactgtgggggctcagggagtgtgaaggcccttcgccatcgggggaggcagatggaccctcctttggggatgggtatggggcccaggagacacccctctatcacatgagatgggctgagaacagttcactctgttaagatcaagtggatgtagcctgtagaaggtttgtgtaaagcccagtgtgtgtgtttgtgtgcatgtctagaggctagttattcaataagtataatctcctcctgtgtaccagaccttctggtaggtgctgctgtgaaccaagggaacaaacatccctgtccgcttgaagcagacctaggagacaggaaacaagagatgcaagtcagatagttccaaggaggagagaaagtggcagaggagtgtgagggcctgggctatgggtatctgggccattatctctgagagtttgtgacttcgggtgtctatgtgtgggtgtatgcacatatatgcccagtgagaaagcctgtgtgattttgtatgtctgtttggggagctatgtgtgtatgtccttaaaatctggaatgcttttatttcatttggtgcctaactgccctggtagcaccatgttgaattgaactgaggtgggtggataaatcatcttctttctgcgtgtattaattgtgtgttttattttctgtctttgaagatgttttgacatctttgcggggcttctcacacatagggagacaccacccctgccaggggtacgtaattccacattggcagaggacagcttgtctggagcatgcctttcgtgtgcatacttcctgctccagtgccgtgtccctacaaacctccttatctacctctcacacaccaagacagtatttcccctgccctaaaccaacctagggccaagtactagacggctaaggaccattcctatcccccagagccagctggaattgttcaaaatagccaatcccaagctgtttactctgccctgacttaggtttcctatggaaccccaaataaagaccatggcctaggttttggtctcactcctgattctgcctcctgagcaaccctgatgcatgccctgaccctgcctggcatggcatgccctcttatcttggaaaatgtaagtaataaaaacctttcaatggcaaaaaaaaaaaaaaaaagaaaaagaaaaagaaaacagaaggtacaaagacttttactctagtttggtcttttatctggaccattgtaatcacctcatcactagtcttccagcttcttcttttgttccccagaaggatccagttaaaacaaaagacagatcagatcactgttctattcacattgctccagtgtattctcatcttgttcaggttaaaatgcaaaaccctaactgtggacaacaaggctgtgtttgaactggtactgactagtgacttggtgcttccttgacctcgtttctgtgcctctccccctggctcacactgctctgaccttattcattatttgattctgtgcaaatgccaaatgcacttctttcttagggcctttgtagtctttttccttggatagccatttcatctctcagatctttctggtttttgcttaaatagaatcttatttgagaatatttcattgactaccttacttacaaaagcatccctcttaatacttgatcactctatatccattaccctgccttgtttttatgatggtattagcatgtagcctaatatatgtttgtttttcattgtcagactccgccccctgcactggaatataatctacacaagaacagagatttagtctgtttttattcatccaactaataaatactgagtgccttctatgaagcgggcactgttgtgggaattggcaagataatactgaaaagaaacaaacagaaatcaagatttctgccttcggggaatttacattcaaattttctacttttgttctagttttgtttgctgttttatccccaacacctggaagagtgcctggaccatggtagaggcttaataagtgtttgttgaatgaatgcacaattgagagttgacgctctagaaaggagaacataggaaaggaactttgcatatatagaatcaataggatatggtgactatatgtttgtgaaagatgaagaagacggaataatttaggatggcttccagttttctagttcataatgttatttgttcaatatcatggtaggaatgaaattgtgttactggctcctaagtatatcctaaagtgatgttcttggactgacaagacatttcccttcgctatctagatttgatatctacccaattgttgtgatgaatatgggagtggggaataagagtatcgaatccatatattatgcttaaagctgagaaatcagcaaatgctactgacaattaaaaaatattgccaatctagtgattcatgcataaacattattgaaatgacatcttcagcttggtattgtgttctctgcttgtatttagatttaaatttcacgattcaatgaggcacagaaatttcattttaaatctggaggagtcttacttattaaggaagaagcagggatctcacatcttagatcaccttccactcctcgtcaaaactgccatcactcttctcacctttgcaagaaagcattgtaagaaattactcagtgtcatctctgtgtgaaaagaggtatttctggttcattgactaaagacgttggttctaaacctaacacataattgaatttagtctgagttttattctctgtacgtgacatattactacctactttgttgtgtgatccaaaggataaaataggaaaatacatatgtataaagtgcttatcatagtgcctgacatatagtaaattctcaataaatatctcagttcttactgtttctggaaagtcttccctaactagcccaagacagcatgtttattccttctctgtatagtcgtagaactttagctatatcacttagtataaactgcctagcattgcttttatttgactttgccttattggagaaaggtccaaaatatgggatcacaggagaatgatttctagtacaagctagctctgaggcagtcctgcaggtgggaaaggaaatggtgaaagtgacactggaagcaaacattggctaattgataactttgttgatgaccaatcttggacttcgttggttatggccattggcaaactccaaagactctcagtgtgattgttcaaccctctcagcatagtacactttggaccaattggacacaacaaaaggcccaatttgggatgttcactctcttacccatggcataataacccactggtaaaaacgtattccaggagtgatctggcacacagacttcctgagtcctggtttaaaaaaattactagttaattaaccttccttttacaggctacccagaggaggaacacaggtgttagttacattgagtactagatggcagttcagtggcactttccatggacacaaaatgatttcattctaacttgcttctgactttccatgctgcctttgcattgctatcacatgaaaactccatctcttcaaattgaacagttttggaaccacattattaggggctctgaagcagtgagtaataactattattcgttaactgaaaaggaaatgtaacaaaaatatattttatttctgtaataaatctagcttcactgaaatttcccttaaaatacgtggactaaaactaactaaacaattacatcacacacacgtccacacacacacacaaccataaagtccaagatatcagagatgttaatggacagttagtctagataaattttttcttgtcttttgggctagattaatctgatgaaaattgccaaaagaacttaaatggacactttaatactgtctagctgtcttaacagatggaagtgcaattagttaacgttaaaaaaagatccaaaataaagtaaaaaggaacctgaatttcaactaaattggcagcagaaataggattttgtaaaaatcaatttagctctaattagggagggtgaatcccttgattttaaatagattgctcactgtttattcttaaattctcttctattcccatctccaacccccgtcctacccataaatgaaacaaactctgaaggatctggaaaaatagtgttttaataaagatactctaaatgataaaagaaggtaaatatatcctgaaagtgaaaaccatagagcggagggggaaatctgattttacagaactgcatggtaatataaaaccagatttgtatacttatacatataagttgtgtgcattattcctctgccaggaaactgcattagacacatctgtataaaatatatttccaatttaaccagtctgcaatgaccacattcgttttctagttcactgcaagggtaagtaacataataagcacaatgtattctccaaatttaataatttaacatgcttgcttagttaacttattattaccaatgtaacatcttgggctttgcttttttctatgtaaaatgctaagcacttggacgatgattgcacatttagaattaaatgtttatcttcttcaaactgagtttgtggaaatagggatttttttcattttttgccattaaaatagtttttattttaaatagagtcccttatttgatagttaatcataaacatacaaacttctctgaaaaatcaaagtgctcttctcctaaatggaataaaatcaagctaaacaaagatctaaaaataagtctgttaagatgtttatagatagagaaaatcaattttaaaaggagcatgtgtgtgttgtagttagaaagtaggctatagttgatggaatgcagacactatggagttgcttttttattgtgtattttttaaatgcaggaaatatatcccacagagatgtactatgtcatttccagaaggactcttttgggccacagctgaaaaaccaatatttaaatacatgaaatatgcaatacaacatgaaaaaccaaattagttgaaagccggtgtaatttttccctccatattctcattctcaatttttattattatatcagaactcaatacaaaagagagaaacccatacatactgaaatccattaatgtgagtgaggacaaaaatgggtattattcagtgttttctccaaatttactgatagcatttcatacatttccaaacttgttctctctgacaaaaaagtcagaccctcatgagttcaattttcaccacattcaggtttttggtcaaatgtcactttatccctgaaaccgtcctggatactctagttaaaactgcacccacaacatccatggcatgattaccctctgcccacatttctttctccctcttttctgaattatttttctttgttttgaaataagtgatgtccgcaggtcttactctgggtcaaaagggagcagcaccaattcttcatcaaatttgaacccctggctagagtgaaacatttacgtattgaacattctataaactgcttagtaccaacctcacagtgttgtgaggatgaattgagtttcaaacttcaaagctcttaaaatagtgcctggaaaagggaaacttctcattaaatgttagctattatcattgttattaatattcatcgtttcaaaaattcaagagataataggaactttcatccattttatcaggtgaagattcttctatagcttgagaatacaaaacattcctcctgctttaacattgtaataggtgctggggataaaggagtgaatgaaagagatatggtctttactctcagaagatgtttatgtctctgtggaacatagttgcctagcaagtaaacgcacatcgaattgtgtaatgcaataataaatgctttgaaggagaagtttgaggagcaactaaggtttatcacaagggaacggaccaagattggagaattaagggatacttcttggatgaagtgacatttgagatctaaagcatgagtgggaattactagttacaggtgggtggggaggggaggagcattcccagcagagggagagtgcttacatgggaagactctgaagctgctggaggaactgaaagaagactcatgtggctaaaccataatcacttggagaaagtggtcaaaaccaagactggagaggaaggttggggctgaacaggcaaggccaagttttgaatttgggattttgtcttagggacaatggaaggtactaagtaatttccagaaagatctgtaaagtactggcttaatcacaacattttgttatttgtgttgtcaactaagaggaattaaaagtagaagtactgtcattggcactggaagaggtgctcatatttaaacattttgggtagataatccatgaagggctaaacatggtaatgcaggttttttggaacgcagttattcacagagcattgccccatttttagatctggcaaacttaataaagctatttacatgtaattgtctagactgacacatgtaaatggttaaagcaggacccagcctgctgggtttgaaatcctgtttctgccatttactctttggatgaacttgggtgaggtattgtctgtttatcagtgtctcatctgtaaaagtagggtgaaaagtattggtttaacgattaaataagttaatatatgccaagtaacttgaagaattcctggcacattgtatgctcttaaaaatattatgacagacagtcatattttatggagtatctagggggtatgcagaactccattaagtctgtcagagcataaataaaggtaatttctaatttatagaaattttgtgaggctaaaatgagacaatatatataaagtgtctggcatgggcattagctcataatgaacactcagtaaatgtgagagcttcagtaaattacagaggagctgatctaaggatgagttggggtcctccggagggtcgagaaatgaagggaggggccggcctggtggcgcagtggttaagtgcgcctgttccgcttcttggcggcccggagttcaccggttccgatcccaggtgcggacatggcaccgcttggcatgctatgctgtggtagacgtcccacatgtaaagtggaggaagatgggcatagacgttagctcagggccagtcttcctcagcaaaaagaggaggattggcagcagttagctcagggctaatcttcctcaaaaaaaaaaaaaaaaaaaaatgaagggagagtccggtgtttatctgaattatttcagaaatttacacatttgaacattttctttatatagttattttaagaatgttaataaataaagttgtggattttgcaacaaacagaatacatgattaggacatcaggaaagtagggacacttaaaaatgaagggggaagatatttttctgggaggaattgcatattgaaagaatttaaaaaaagaattgcggtagtcagtatgagaagaataagatcattactagttttagatttattttacaaatagctatatctctacctagctctctctatatatagatattttattttgaaataaccgttcgagacaccataatcttctcagtgtctaagggactctaaagactgtaatctggctccaatagatagagcacacagtatcggaccaagatgctcaagtggctccaagggaacacgtgccatagttgtgttgtgtaaggaaggttcattgtcacagaaagttgtgagttggctctctagggcacaccttacaaactagatgtctgctggccacgttcattcattcataaatatgttaaatattgattaaatgcctactgtatcagccagggcccagtaaggaaagtagaaatcacactagcaaagagaattttgtagggggatttgagcagggagatcaaagagaagaggattgagttgttagaaactagaagctctgagggctgccgggtggatgtggatggagtccaagacttctaaggagagggtgttgctgggtggagatgcagcttcagcagcagaggcagggcttgcggagatgggacttcctttgtggaaggcctgctgctgggcagatgttggtatctctgatgaggctctatgaagctggatgtgggaatgtggaagaaagctggaaaccggaatgaactgctactgccagaacagcaagagaacaggaagaaataagtccggtctccatctttctgcctcccagtatctctcaagtgctcctgattagcaaaacctaacaggaatccagttggcaatggtgaaatatagtttgccaagttccagtctcatggaacagaatttagaagggtggatttggagctgaggagaaaaagctgagtatccagcaggcctactatgtgccacaaatcatgctaaagacacagctgtgagcagaacaaagtctctactttcatacagcttatattctagaaacaataataaagtaaaagaacaaatgaataatattattctagtcagtcatatgttctggaagaaaataaaaccaaaaaggaaataagagagtggctgatggcacaggggaggagtgctatgttagaatggtggtctaaggaaagaagaattgacagagttcacagagatgagaggaagctctggggagagctgatgtaaccatactcggctgaaggagtagcaaatgttaagaccctgagtcagaaagcatcctggcacagagaagatgattttggaaatgtagaaatgagacatatcatctataccgtgaagttaggtttaattttattccaggtaaaataggaagactggagaattttacacaatctgtgtattaagaaattcattctgtctgctgtgtggagaatggactgtagacaggcaagacagaccataaatgctcacagatgtatttcatttggcttgcactgagttaaaacatgaagcaacacttaaatgttggtaaatttctaataaaaatcaaatttctggcttctgttgaaatatctgaagatttgacattcctgggctcacaacatggcaaccatctgttgatggtaagtggccactgcctttcagaaggggcagttcaccactatccactcacctctcattttatccatgacaagcttatttccttcactaatattaattgcctgaaccctacaggcatttgtgtttgcgacttctggttgtttttctttcccttaagcaaaaactctctatcccccctccccatttatagtaatttattttccttggtcccatcattgatccaggtgtgagctactcttatctggacaatggaggggagaagcatgagcaggacaccagtttccatttttcatccttctgcatccagccttgttgcctcctgtctcagactgaagagtacatcctctcccagcaccaattccaaacagctattaaatctcatggtgttctctcagtcttctcagttttttggtccaggttaatcttaggagaaagagctaggtcaggaactggaaacagaaacttataacacattgtttttccaaacattgagtcagcatcctacagagctgttttagcacatgagcaaatggaataactttttgttttctttcataaaggattttttaagagcttttttttttcaaaggggggttgtctactattagatattttgcagcactcatatttcaattgacatgaaactgtattttcacttgtattgatttatagaagggtaaacacaattacgaaagttctgacattttaacagcaatcttcacgtgtttgagattatcatttagtccatatattcatgtttaatccaagcatcaaatactttttactaactttatagtcttccataaattaattattggtgtggtatcaaatcccatctcagattggaaatacaaagtacaacataattcaataagacattttttaacaatataattatccaaattgtatcttagacaaaactatatgttaatattactattacacatccaaagaagtctgtggaatttgtcaagatgattaatatacattatgtataacataaaatggtggtgtatatgaacaaagaatgcagcaagtaaataaaacacattaaattacatcttgttaacttttgagtaatcctttttatgtataacataaaatggtggtgtatatgaacaaagaatgtggcaagtaaataaaacacattaaattacatcttgttaacttttgagtaatccttttcatttattttcagagtatctgaggaaatagatattctccctatccccaaatactttctccaaataacttattgagaggaattgaatttatttttaagtattttctatatagatttaatatttgacctattattcatttccattccatcattaagtagaattccaaaaaggataatacatgtgatgggtttgttatgagcagtttgattatcatttggctgtttatttataaaccaaggactataagaaagtcagaaatcaaactgtcctatcccaaaaataaaaatctaaaactatggtgaacactaaattcaagtaatatgacattttctaattattttacagtttgacatggaaaataaagaaaatgtaagcatcttcagaaaaaggattacttcttattcactgttgtatctccagagcctgatataatacatggaaggtattcaataaatgttaattgaatgactatcgaatacaggtaagtgcctctgaatgtttttagaagttatcatattatgattattataaaatggaaatgggtagatgctaaaatgtttgacaagtacaacattggcttcagcaaaacttgggaatggtttattgacttgggttattagatatttttttttttctaaagattttattcttttgctttttctccccaaagccccccggtacatagttgtgtattcttcgttgtgggtccttctagttgtggcatgtgggacactgcctcagcgtggtttgatgagcagtgccatgtccgcgccccagattcgaaccaacgaaacactgggctgcctgcagtggagcgcacaaacttaaccactcggccacggggccagccctgggttattaggtattttttaaatgatttggattaatagaagttcttggaaaaaaatttaaaaaagcaagatctagggggctggctccctggccgagtggttaagtttgcgcactctgctgcggcggcccggggttcggatcctgggcgcggacatggcaccgctcgtcaggccacgttgaggtggcgtcccacgtcccacaactagaaggacctgcaactaagatatgcaactatgtaccaggggagtttgggaaataaagcagaaaaaaaaaaaaaaaaaagattggcaacagttgttagcccaagtgctaatctttaaaaaaaaaaaaaacaagatctaggcattgtttctccaagtgttgtcttctagcagtatccatgtcagttttatgttcacttctggctaattaagagaagatattctagaaagagggtaagcaggagaataaagcgatcatgagtccagccagatgtggaacggttgaaggtagtagttctcaaagcgtgaccctgaaacagcagtatcatcaacacctggcaacttggaaatacaaattctcaggccctgccccagatgtgctgaatcaaagcccagggggttggacccaccaatgggtggttcaaaagatcttctgggtgtttctgatgtatactaagtttgagaaccacttaagtaactgaagtggttatgccaaggacaaaaaaagggagggaagggaaggtgcaactgaggaatagtcctactgtagggggattagagggtcagactaattctgagttactcctgagggaattatgagccacagtgattgggggatacagatggcagattttgactcattaattttggaaatatttattgaatcccatgtatgtaaatggccctctgctatatcttgggagggaaaaaatcaaggaaggtatgaatctgccctatggagctcactgttttatgtgagagagacaagcttttgtccaagtgtgatgggaaaacaggagagagacctctctgtcagactaatagggcaggtcaggcttcactaaggagctgccacttgagctgagttctgaaggactggcaagtattaactagagaaagaatgggattcagtagaattagaggtgcccaaaagtaaaagggaatgagagaggagtcagagagaggtggagacggagagagagggagagaaccgtctcatgtaggggcaagctgccttgtcacatgcgttatcgggaagaggctgaccttctgcttgctctgttgaagaaagaatacttgctgtagttggataatgtactcaatgccaaaaggtcccttttaaaactcaaattctctgctcctaccagccataagcaagaaaataaaacacactaacatttacctttggaaccccttcttttaaatgtagtctttttctaagttactaatattccgccttgctcacttttgccttccttcctgcccacctccccaacaaccatgtttctcattgactcagtcctctcccatcccatctcccaccactgacagccacttccaggtgctaatggttgatgcaaaggcagaacatgatgtcttacttcattctactctgggaggggcgtttagcagagactcttcaacaaggaaaggctcttaatccaaaagtctactactttattacaaacacctgaaacagtgtagcaagtgtatgttagaggcatttaggcagcagttgttactggagtgttcgtcagtcgaccagccctccttctatctagttcaccattattgtaagaaaaagtacacttcagtagtcttagaagtttttagaagttgagtataaagtgaccagatctttattcactctccaccctgtggtgtggataccaagagacccttctgtaatctgattctatttggacaagcagtggaagagacatgctaaaattggaacaaaatgtttggtgactcagcaacattgcttgaatttgtttttctctgatctaatcatagcagtcaatttaaaattgattgaaaagtcccaggaaagtagcatttctagtacaatagggctatgatagtgggatgtgccagaaagacagaaacagctataaccagcctacttcctcttaaatcttttctcaaatgccagaatccaaagtgttttctttttttttaaaaagcttaaacagtccttgatttaaacatacattcatatgcgtgagcgcgcacacgcacccacccacacacacacagttttgaagtcctttctttctgagagaaagaactctcattttctctcccctgtttcacccactggctgttgtactcacctgcatttatgaattgattacacgaggtgaatgctcagatctaactcagccttcacattattgtgtctgttcttgtcccagtctgtcctggatgctcagttcaattctccagggggagcattaaaactggggtaatattttgagtgagaataagtctaaaagattggagaaatgtttacaaagataagttaggctggacaagaactggaccttgagaatgttctactgactgcaaaggtgactacaaaaggcccgtgaagtccctggacttttccaatcctggaacgtagctaatgcatggaatcaaagtagaaaattcaaacccatcttcaggaacttcttttgccacatactatgtgcctctgggcaagttgcccaatctttctaagactaagttagtaattcgagtctcagccttatcacctatatttagaatccttaagaaatcacgctagtttaatcataccaggaaaaataaggattaggtttagtcattttagtatttataatcctttgaggtataagactatattaaaaaatcattaaatttcttgagcaaacatgaagtaacatggttcgtagttaacttgtaaaaatcttggggaaaaattactctttaggaaagcagtatcccaagggatacatattaaagaaatgagaccagtatcgtagatctcctctatataaactacaataatcagcaagaaagagttgtataatttgatccgtccctagaactgttctaagttataactagcatagccatgcaaactgctgatgatgaatttcttgcttatttaataatatagagcaatccttcaagatgtcattcaatggtcagatcaaatcatatgcccattcacccatgtattctatcacttcactccatacaaaaccaattttaagaagtaagcttgttgacaggcacacacacacattcatatatatatgaatttgatttaaaagcaaaaagcaaagactagatctggtgctgtctaattttggctggaaatgaaacatgaaatgaccttgccactatgaaagcataagtgtgtcatatactataaatttaaactccttagcatttaattaaaaattaaattctacattactcctaattctttttctaattcttctataaatatcagtggacaggacattcaagaatagcatatatgtacttaaaccattttcctggtattttcattttatttacagataaatgctttagaataagactcagcatacataaagaggctttttctcagcatttaaacaacttggagggggatgagaaatcttgagactgcctccacagcaatttctggtcaaacctttgaagaccataaacatgtattggtatttcccacataacccaaaggctagtatttaccatcagttaacaagaaaagaccctaaaccacatattatattttataacttttcaatgtccgctataaatgagaagcagagtcctatttcatgcaagattggtgtgtgcccaagctcaacccttgccagaatttgaaggctagattggctggtgcacaaatctgccttctgctttcttttctgttaaatgaaaaattaaatgaataggtgcaattgtaaatgctgtcaacagtatttggactgtatttttaagatacagtagcactgtcgtttgagtgatttatcttctaattatttggcaaaatgatataattaaatatcatgctccatcatgggtttcatgtaaatagcctaattagccccattttggctccaaagggcacctccacagagcttctggattttgaggagagacagctctttccttctgtctcttaaaaaaaggctactactttatctttcattctgcatgagatttatgggctttaacttccagcccatagggtagaagatcaggctacatgccttcatttactcttgaaagttattgcacattctctactctaactgccttgcccttcaggataccataggtggagtctcataactctaaattaacatttggaaatgacttttacattttgggtcattttatggtgtcatttcagtgagttacacatttggaatattacttagctatatgaataaaatattcttgctgcactgttacaaaatacttattttgcttttgatataatgaatgcataaagtttctactcaattttttttcccctgtagtaggtgtagggacagggtaatgatggtagatgtgaattgacttggtcaacttctatgaaaaagatcaatataacccatggccctgaacatttcaatgaattttgtggagagcaatagtgtagatctatagaatcaagcaaaagggtttcatgaagaattactagtggggctttatatgctatatcagagtaaattctttaaacctgtcaaattctccttttagcttgtgaattcattttaaatgttttttttttttcctgaggaagatttgccctgatctaacatctattgccaatcttcttcttttttcttgaggaagatttaccctgaactaacatctgtgccaatcttcctctattttgtatgtgggttgccgccacagcatggccaccaacaaatagtgtaggtccgctcctgggaactgaacctgggccaccaaagtggagcatgccaaacttaaccactaggccatggggctggccccttaaatcagtttttaatttgaaacatattcctatcatattgaaggattattatgatgtttctctaccccttcacctacttaaactaaacaaatcaaaaagaccaaaatttagcaagctgtaaagggaaatatagacatcagcccttccagataggacttttcacctctattcgtgtgtctttcaattcaaagcaaagtcaggcattcttttatgtatttatttttttttgtgaggaggattagccctgagctaactgctgccaatcctcctctttttgctgaggaaggctggccctgagctcacatccatgcccatcttcctctactttatacgtgggatgcctaccacagcatggcttttgccaagcggtgcagtgtctgcacctggtgtctgaactggcgaaccccgggccactgagaggcagaacgtgcgaacttaaccactgcgccaccaggccagccccaagtgaggcattcttattaaatatctattttaacatttattttagggcaatgtctcaaacatgcttaaagctgtaaaatagagattaactattgaaaattggagctaactatcccaattgtttgaataatttaggtacttttattgaaagtttgttttaatctaaattgcttttagataaaatttggcttatctctctgcacaaggccaaattatcacagaccaaatcccaggaatctattaaacctttttttcaaagtcaacctaagtgggacggtttcagccaaaagctccctgagcaaggcaaatgttaagttcctgtgacatggaaagaacagagtaagcaaaacaataaagaaggaaaatatcattgaaatctttgggcttcatcgtcctttggagagctttgaaagggagcaggacagattccacttcagcaagaatttgtttattctgcttatctctggtcagaaataatagtcttaatggtttggagagcctttgctgatcctgggttgatgtggccatttgcagattaatgtacctatttgcaaatgatcatatttccacatatcatttgtagcatatacactgtgggttgttacaagttatttttattattgaaataaatacaatgtgcttttaaatcctcaaagcatgttgtcatagcatcaagtaaacatatgtgaacgccttttcaagttttgctgctcattgacaaatatctttgggttctcatgggcagcacaggcaaaaaccacacacaaattaaaataaacaataattccagatttgatggcattctcttcaatttgaaatttcacaaagtttaaacaaatgggtataaagaaatggaaaatacagtgaaattcagtactgaggaaacaaattgaatgggctggaacattttgtttatgtatagttaaacatacataattggtgacttgaagtgaagaattccataattatacaatccttgtgtcctactgctctgaaaaagctaacaattctaccctcaatgaagagattcaataagcaatattgtagacagtgcttcaaaaatcttggctactcattagattcacctgggagcttttaaaattctgctggtgcctaaggcctcacagatacccataaaattgaatatctgggctccagaatttgattttaaaagcgttgtaggtgattctaatgtttagccagacttgagaaccaaaattatagatgaatggttctcatacattagctttttgtagatcacttggaaggcttgttaaaatacagactgctgggcctcaatcctagagtttttatttcaataggtctttgatggggtctgagaatttatatttttaacatcttcccagatgctgctaggtgctgctgctgctgctcttctagataccacgctttgagaaccactgttatacataattctgtattgactgagaaaatgcgtagtacctaaagtaaccatgtgtattttggttggttgagaaaaaatccaaaataataataaaaaagtataactggatgttacaagggaagtttttgctgaaatctcggaagtgatacttgtcaaagagactattttgaacttgaaaaagatgattgtgaaatggttatacaactcttaaatccttccccactttgagagtaaaaaattgagagatttttttcatatttctttggagaaagctaatgatataaaacctaatccccacttccaaggagagagtcagaactacttgttctactgggaccatatctcctggtttgccccagactgaagagtttcccaggatgagggagctttggtgctaaaacctagacagtcgtgggaaaactggaatggttggtcaccctacttctgcgccctcatattaagcctaataaaagcacttggagagcttaagacatatctgtagatgaggctacaggggtcttatgtaagtctccagcctgagaaaactaagggtcaagaggaggcctgcatagctgccaatggacaagccaaagggaacgtgacagatttgaaatcagcctatactcccagagttagagttaagtgtgcagtaggatttcttatggacaagatgtaagcacatgtgagaggccagtgggagtcagattaagtcctgaccaatagaacttcttggtagcagggagaggtgaaggcattgctggatctattgacaatgggaggagttgataatgagctctcagcagatcactagggttaagacactgaagataagaggccaaatgatggaacggaggaggaggctatgaatcacccacaaaaattcccataagagaaagaactttaaacacctacctgcccagagagtgcaaaggcctctcactatggcaagaagaccacagccccactccctgccttccagcctgcagaaggccctagctgaaggagggcagagcatgcaactttaagtcaagtatgggtttttgattgtcatatagaactggaattttacattattgaacagagaatgcatttgtccacttaaaagtgaacttattatttaagaatgatcaaaaaatcatgagataacttgaatcatcttccagagacaaagaaagaactttctccattgacttagttttaaagtatagtgggaaaaagccccaaaaattgctttacagtttcactgcatgagttctgcttgtcttgcttatttattctgtgtaaatttgtgaaaaggaaagggaaaagaatgtattggctcaccaaatgggaagttagcattagatctctaactagtcaagtaaaaatgtagtatcaatgattaccaagtcttggctgttttttcttctttgatggtggaattttcaggcatactatccccacctgatattcaaaatgttcagcagttctaggtttaaactactcttgcaaatcaattctgaatattcctcaggggtctcttattggctcagcttgttcattgctgtatcaattattatggttaaataaattcaacactctcaatggccaggcctgagtcccccaagttgaggaagggtttggacagtcctaattgaattacaagaaagagggcattcttttaacagaggaagagtggagaagcaaaaggttgttggacaggcaaaaacatatatacagtcactgcagtccacactgtgttagtacttagaaattactcaataaaagttggatgggtaaatgagtgatttacaaatatcctttctttccttatttgcagtgaattgcctctagatctcttatgacagtctcatggtaaggcttataatgtcaaacctcaggcttgtaatttcttatatcgtgaaagcagtttaataattaacatgtaagattaagcaacagaagcttcccaagggtgccttaagaatctaccaaaatacttaatttgcttaatctctccagcacacttttacttgcatttttttcaaataaatataacattaagtatttttaaaaattgcagttaaagaaggtagaaggtgttttcatagattattgtcctttgtgtaaaagtgtgacattactgagcctccattaataattgaaattactgttaaggagaaactcgaaggggtttgagcaagaaacagttggggccatttggaattctttcaaaacacattgatgaacttctctcagtagctaacaaaatctcctttatgaagtatttggttattctctactggatagattagagcttgtggatagttttatactactggtggagaatcatgaccatgttcttcaacagccactcctaaaattggattagtgacgtaactaaaaatttggctaaagcttggactcatcttctaactgtgacgttcagatgagaagaatgatctttagctgtatgtaaagtagagggagtaaacatttgttttgcttttaggagtttctgcatttgtgtgtttttttctgaatcctgggagtgggcttggatttgtggaggtggctcaggaatagaatgatggctcacatatgtagcaccagtattgagaataataattttacctttgtactttcagtattcgtttgctagggctgctataacaaaacaccataaactggccgacttcaacaacagaaatgtatattttctcatgattcttgagactagaatatcaaggtatcagcaggcctggtcttctgaggcctctctccttagcttgcagatggccgccttctcatgtgtcctcacatagtcatttaatttcctcttattgtgaggaggccagtcttactggcttagggcccacgtatatgacttcattttattttaatcacctctttaaaggccctatctccagatagtcacacctgaggtacttggggttaggactttaacatttgaattttgggggggacacaattcagcccctaacactttctaatttaccatgaaaatagctctgataaactacagaaaatctatttgttattgcttcagaaatgctatttggcaagttagtttcctctttttacttataaaaaaacttggactttagaagttaaaagtcttatccaaagtcaccagatgagcaaggaactgcacttggattaaaattcagggttttctgtaactgttctttctactctatcaccatactgctttttaattctttatgccaactgaaagaatgataatacgacattaaaatggaaaataaaaaaggaaggatttgggtaagaccagataaatggtaggttatggaaggccactccagataagaatggcatagagcgtatgtgggtatgggcacagaaaactgagtactgacaaaggagagagctgcctttttacatgactgagtgcactgggtcctatttgaccaagctaacagttgacttaattgattttataagacttcaacaattactcaatagttccaatttagttaatttactacaactcctctggccaaaaaagaaaaaaacaaaacacccaaatgctcaattcaaaagcttggtcaacatcccaatgttatattgattataattatattgcttataaattaaccaatattcagtttcacctttatgattagcaccatcttattggtctagtacatgtaacaataacaacagcaaaattaaatatggaaagaagagcggtcctcatttccacacagttcacacatgtgctgctatgttattcataacacattttagggccctgcttaatttcatacattctctacatacacttgctaaataaaaagtgatatcttgaaaaagcagaaattcagatttactaggtagtgtagaggacaggaaacaaactccatttcatcttggggctgtgatgaagaacatgctcctgtgtttttcatattaaattttcactaaaattcgagaaacttggactaatcaaatacgaaagaagatgaatctgattagatcagattgcttttcagctgatttctttttcgctattgttgacttaggaggggatcaactaaccacagaaatggggaagatttttagtatcctttctttaactcatctttagcttttagaaatataacacatttgtatggcatgttgaattctggctttaatgaaataaagaatagtagcataaagcaggaagatcatgagaaactgagatataaattctgaagtaggtcaagggatagataatagattccaaggttaaacactaaatcttacagcttccaagctggccgccagaaagaacataacaggttaagaagcagaggcctaaaaggaacaatattctttgctgtaatcagagaaagagagtatagtaattatgtgcatatgtttgtgctttacagcattctgatactaatcagtatgtatttctatatatgtaaataccagatcaatgaaaaacactccatgtgtgtatatttagcttcatgcacctccttagttagatacatggataaatatacacagagaagctaattgaatatgaatgagaatctcggttaaagtaatatggatcaaaaactggccaccacaggtttggaactcaggcactcatgcctacaagttgtagcatttttctcactatattattgaaattgggagttggtccaaagcataaacagtaaaggactgattactgcaacgtgatctactcagagatactcacaaggccacccagaagctcctgttgatgtaggaatgagcccccttaggagcccgaccctgcccaaatgggtcacatgggcagggtggcctgccctggctacctgtttatttctcaggacaatttgatccttggaatctagcaccagagaacccacgttaggttaatgccctgaaacagagctctgggagcatgaagagaaaagagtaaatgaactcatatgtcttattttcacaaattctgtgttatatcctccttccttgagaaaacagtttggtgatctaatgtctaattttctttctttcacacatggtattctctccgttttttcctctctctctctcatacacgtttttgcaatgatcaagttcataaatgagaatataagacagaacactctcagaaagagagctttctcaccaactcttactacattagaaccacatgaaataacacttgttcacagaagatggagagcatttagtagacgtgcaggatttcagatggctgagctcatttactgactggctgagatgattttgcgatacgcctgcatcttgaatgcagcttctttgggcttatttcatatagctgggctcattagttttgtcagttattttggaagtatgtgtacaaaacctgttttatattgtggataggcctcaggaaatcatccttcatgactcttatttgaaacacagttttgaaaatttaactcaaaaggcatgccatatttatttaacatgattgtgcttggtctgaaaatatacacggatttttattagtgtgttcttttctatagtttaatgtaactgacatagggaagaggatttctttacctccttctctaccctctctcaccctcaaatatcatgaggcatttattcaacgatttggaggaaatgtgaactttgttggtttataaaatagcttttcattttgaaaaaaagttaaccaacagaatttttaaaaatacaacgattaaaaattttttttacataatcagcaacacgatattttagtcatttaaaaagtttacttgatacaagctaactaaaaattccttgcttatgtagttcttactgtttatgactatgacctagcttacagtatatctttaccttttcaagtattttgctctctcttaacttggactcttgctataaaagaagcagcaggttattatggaaagaaccagggctttggaattccatggaatagcagtactgagaatacttattaagcttacttagatgtaatttcctaattggggaaaatggagataacttgatttatttttaaagattagaaatgacatgaaaaatgtctagcataactcctggctcatagtatttgaacttgtaggttctcagtaaatggtagtatttctaccaagtttttcaaatacttcctagatgtgtgtttacaaaatatttgtgtttgctgcttcacatgggaatacttaccaaaagtgctcattatctgttctttttttggacaactttattgagatatctttgacatataaaaattgtgtatatttaaggtaaacaacttgatgttttgagatatgtatacattgtgaaaagatcaccacaatgaagctaaacaacttatccatcacctctccatagttagcaccgtgtgtgtgtgtgtgtgtgtggtagaagatttaatttaagatctatcctcttagcaaatttcaagttacaatacagtagtaattattaatggttaactgtcgtcaccatgctgtacattatatccccaaaacttattcatcttataactgaaagtttgtaacctttgacctacatctctccaattccccatccccctattcctgccaactgccattctgctctttgtttctatgagttctaagcttttagattccacgtataagtgggatgatgcagtatttgtctttttgtgtctggtttatttcatttagtgtaacgccctccaaattcattcatggtgttgcaaatggcaggctttcattcttttttaaggctgaataatattccattgtgtgtatataccacattttctttatccattcatctgttggaggacacttaggttgtttccgtatcttggctactgtaaataatgttgcaatgaacatggagtgcagatatgtctcccagatccagatttcacttcctttggatatctacccaagaagcactgttatctgttcttggtgaccatttgccatctccactctgactgaagagagtagaagccactagcttagaagactggtggcagcagaatccatttgcagagtagatgattatcctcctcccacagggctgctggctccatcctgggaacagcaaaaggacgttaaaggaaggaccattggaagacagaggtagccattatgtagggagcagcttttacttttcaaggtgatttttttcatctaaagtcatttccaaaagaaaaacaaagaaagaaaaatggttcaaaaagatgtcagaaataatattgaaacattgataaggcttattgattattactttcgtattttatgcatggcacattttgtgaacacatctaatgagcatacattgactcacattcttcattcattaccaggatttattgactctagaaattaatattgactggggcaaaacagccactgacttctcttacaggtcaataaatctgccggtggaagaataccaaaccagtagtcagtacattttttcttagcagttgtttttttcctttgccctaggaagaatgtcagtgcagctgcctgcttccagtgagcctatcatgtgttttaaaaatttagtagctggccatttagagtctggttccaatttacattgtgcactaatagggcctgaatataaaatttccttcagatgcattaatatgtgtaggtataatgaagccaaagcatatttatcacagttaaatttcataaaaaatgccagaagaaagaaaaggaaaaaattgcaaatttaatacatgtgacaataacctagaaattttacgcaatttaatcgtgcatttcaaaaggtataactgagatctgatcaagttactccatctttctgaagttcggttctttcttctgtaaaatgaagtgtttaaatttgtctttgaggtatctgtcagctctaagatccaataaactatgaatgctttttaagagctagaatatgtagatgtggattgttctctcaacctgaaccccatagagaaactattcaagattcggaaagaagaagtaacaaagaagtagggcacgtcgttacatatatttttcagacccatttgctttgtataaaaatgagtattgggcagcctcttcatttaaagaaagagtggagcagtggtaaaagtatacgacttgaagtttaaagatctggttttgaagattagatatgtcctgagtatgtgtgtttgtatgtatgtgcatgtgtgtgtgtgtgtgagttaaattaaaataaattagcaccttctgtgtatggatcatttctcaagtacttagtcgtcacaataccttgcacagtcatgtgtttttcattgagagagttgatgttcagagaaatccatttgcctgcccaaagtgaatagctgggctgtcatttgaatccatgttagtctgacttcaaagatgatgctctgaacagtcactcaatttctctgaactctttctccctccattgcaaaatgagtgggccccactcagagagagaagccactggaaaactgtattgcctgcagagtccaacgtaagtgttaattgtgactggtgattttagtgataatcatcttatcttagagactgttgtttggaaaatatttcccaataaaaggccaccacgagtaacacagaacttaaaattgtaagtagctctagaactctagtaggtcttggaaaagtgcttaggcaatccatctggcaaaaatgccaagtatgtgaaatgtgtagagaaatatggcttcttggcctttttctccacttagtgatgccccatatcctgctcctcacctggatgtccaggcctttcgagctcccagatcactctaaaatccacctaggtgcacctttctaacagcagggggcagtagaccagggattcaggatatgaggtttgcattcacaaagacgggtttgaatcccaatttttccaaagcatcagtctctttccctttaaaaggaataataataagactttccacacgtgactattgagaggataagttaggcagtggcatgtgaagcacaatttcctggctcacccaaattcctaagaaatgttggttactgttattaacagcttaaagaagtctcccaatcattttaagaaggatcagtagcctttacaggtgaacaaattcaaaggtaaaggcaaagtttagttaggttgtattaggagcaaagaagtcttctctccttccctgtaattgttccctgtagatgtctactactctgccaaagggcaatgcctatcctggtcatgataatttctcttttgtatcagtaaaaataaaaaggtaccagtacgaaacagaattgagctctctacctggctatatcattttttcagaattacttaccttgaggtattttctataactagaatgctccccgaagtcccaggcaatccttgtccttataatagccagactgtttattgaggcattgtggccaggaaggcatgagacaggggaaatgaacagtagtctaggaagtctggtactggtcctgctctatgagtaaacttgtggggccatgggtgagggatttaactagcaagaacctcacattcctcatctataattattttacaggggcactttgggaatgaattatcttctaatcatagatctgtgtagagagtacacacagagggttgtctttcttctttatttcatcctccatctattccctctttgcctttgcccctccttcctttacttcctccctttgttcagtcttcccttgccaactcccacctgtccccagacactcagcttcccctgctgtgacatctcaaaggaccctctactttctctagtggagcacttaccacagggtcgtgtaactacttgtttaattgcctggcttctcctaagcactacaagttccactagggtgagatttctacttaaattgctgagctgtgtatcaccctcacacagcatggtgcctgatacatggtaagtacttgctatttgttatgccaagttctgtgcactggggaaaaatagtaaacaagacccagtggccagtctctgtgagctcacatttgctgactaaggaggcatcattgagtaattctttattcaatcattaattcactcattccacaacgagcatctactatgtgccaggtgccacctggagatacaagggtgaaagagtaaagatacatactctctttgctctcagggatttatattctggtgagtggaaaatgactgtgaacaaacaaatgaatggacaagatggccctagacaattgccctgtaggtgacataatagaatgatagattggacattgcggggtgaggggcttaaggggttattttagatcgtgtgctttaggaaagcctttctgaggaagtgatatttgacctgagagctgatgacaaggtggggcagcatagaagctataagggaaatacattcctggcaaaggaaatagcatgcgcaaaagtctcaagtttggaggaagattgggtcatatgaggaaaaaaaagaatgaggtctttgtctagggtgtggtgctggggataagtgatagggggtgaggtccaacaggtaggcgaaggccttacacttgaaagcccctgagtgcatctcctcatctggtctctgttaggctctctgtgctcaatggaacactgggaatgggttccacaagcagccaactcaataatctaaactcaaggcgaattgaagaaaaacttaatgcatgagacctctgcaaaaaaaagcaaaacaggacaaaacaaacaaacacgtgtagttcaaaaagcaggaaaaaacccccataaaagtatggaggaaattccatttctgtaaacagatttgatttaataaaagaaacactttgcaaatgccagttactcacactcagttggatatctcttatatgaaatgaaggcagcctgggaaaaaaaagaatatcagcccctggcttgctctctgcaaaaatgtcctatgctattcactcctgggaaacgatggatagacagagataagaagggacaagggttccacattccgtagttttataggagaaattgttcctgtagtaagattttcttagtcaaagagtttacagagtgaaggaaacacatttttgcctactgttttctttataaacagatctctctttttaaaatttttaaaataaattcgaatacttttttttccagaaggaaaaaatgctagtgctgacaccttgctccttcattcctttcccagtaacctcgcacattttttactgatgttgtcattagggaatgccagggaaaaagcttagtgtgttctgtgaaaattgtttcactaaggggaagcaagacagctaagtgataagataatttaaatggcagcaggaaagacacttaaagtggctgagggtataaatgacagaaggaacagaaatgagaggttttggtataggcctcagctcaggagaccgtgggaaagggcaaccagagcatggtagtgttttgcatttttctttttatcagaacaggaacttctcatggttggaaatagagaagatagctattgaaaattaatctttcaaataaaaaggaatataaaatgacttaaagggaaggggaaaagacagagcatttactgggtttctgtcctgggctagacaccttgcctggtacagtgcaagtattttcttatttattcctcactcaaaccaataaagcaggaatcatgatcccatgttgataaaggaagaaattaaagctcaaaaaatatgtcattcaagtatcaccttgcggtatgcagcagagctttgatttgagccagatttctttgactccaatttccaggttatcactgtgtgctgttgcaatccttccttaaatgcagaatttagggaactcacactaggacatgtaataataaaaacgcaacggttacctgttttaagaaagaagctaaaggaatatacatgggctgtgctagccagagcactgtataattaatttactggtgagttatcccttagcctatttgccctcagagccatatttggctcttcatttgctcttggttaaaccaaagggtgaggaggtgctgaatcctcaggttgggggcagattggagtgaggaggaaggttgaagccaagctatttctccctctctctcttgcctctggcatctgcttgaactccagctgccttttccctgtggcccaggtcctgccaggcaggctcacctgttctagctccctccaggtgacccctgtctttgggttctggaaccacagccacctccctctggcctctggcctaggagggtaagggtttcctgctgttattgctaatgtctcagtggccaccagacccctgtttgacttctcagctctgctattttgggtgtaaaaattccccagcccttgcatatactctagttgtttctctgtcctgacttggctctgactaccaaaacggcgacagagccacacttggcgaaagtaggagaaagctgatgtttgcttgttcagcgtgcacttcctcctctgctgacctctctcctgtgcccattgtgttcatgggccctacctcctcagtcttatctaacctttcttcccagaaaagatctaaaacttggccaaacagaggttaacaaaaatggctaaacatttcccttagaatgttgtctctaaggtgatctgcacttagtggagattagcaccttaagtttaaagtggtggagcacaaagaaaaaaattgctaggatcagtcagttatggaaaaatctgtttcaattaagctgcattttatcttgaccctaagaatgacattaactaggaagcaacttacttaaatgtaagtctgtctttgccccaaactttaagctaatcaaggaaatgatgaataataaaaaagaaaggaactgagggtagaaatacaaattatctaactaggagcactagcggaagcttgcgttatgtgtgagacactgtgctaattgagttacatgcattatttcatttaattgtcacagtaatctagcaaggtagccatgattcctaatttgagatgaagaaatggagtttcaaagaggttaaataatatgtctaggtcagagttagtaaactctggagctaggatttaggcccaagtcttcttttcctgtctatgttatttcagttttgcaaaatatatgatgagctgtggaaattaaaaaccattgggccatgcactggatttgacccaaagaggaggtattttgtttggctccagaatgttaaggggttttggggccactatttagaaattgaaaaagtgggagatctagcaaaagtggacctgcatcctgcaagacacattggctcttggctttcggaaaggcacaggctctcagatttacaagagtcctcatgtttttctcatgtctgtctggtatttccctacacacatctgctttcctggcttatgttgtctgcttgatctggtatgcatctgagacacctgctgaattgttgtgcccagcattagttcttggaatactggggttctagttccatttctgtaaacagaggataataagtagcaacaaggatcctggaatggaatatcatggtttaaattccagctgtgtgatgctatagttgtgtgaccttgggcaaatgacttaacttttctgtctcaattctcccatttattaagtgggtatatcattagcacttaccgcataatattgttatgaagataaagaagttattatttataaagagcaaataacagtgctgggctcctaatacatacatatgtatgtgcatatacatgcatatatatataaggtacacacacaattttttgttgttgcagggaagcattcgccctgagctaacatctgttgccaatattcctattttttttctctccaaaaccccccagtgcatggtggtatatcctagttgtaggttcctctagttcttctatgtgagctaccaccacagcatggcaactgacagatgggtggtgtggttccgtgactgggaaatgaagtcgggctgctgaagcggtgagaacaccgaactttaaccactagaccatcagggctggccccactcccacatttttttaacaatacattacctgcaagtcagtgtgtattaatggaaaaccattcaggatggattcggagaaactagaaaaacaaaatatttgacattttggggtttctgttacaatattgacatcagcagtatttttaggaagatggaggaaaaatgtgaaaatatgtacaggatcctttaacagtaaggtgagcatataaatgcacaatggtattttggttttagatatcagaccagtcagctcacgtatattgacagcctatgtgtcttttaaaattacaatctgtttgggatgattaagaggtatagatcatgctccttactgtataatagcttagaattcaacagaattatagtaattctgtataattctagtatataatgtcgtcttctttttcttccacattgaagtaaaaataccttgatcaaacacaagtgaaatctcatcatatttctttctaagcccttcagttatctcattttattcagaatagtgttccacaacttgcactttactttggaaaaatttaaaaaaacatataggcatgcttaatgctattttatacttagaatacatattgtgactaaaaaagtaaaatctaagcattgctagttttaaaagattcatattttatttattttattttgttttttttggtgaggaagattagccttgagctaacatctgttaccatttcaactctttttgcttgaggaagattgtcactgagcaaatatccatgccagtcttcctctgttttgtgtgtggacgccacgacagcatggcttgacgagtggtggtgtaggtccacacccagtatctgaacctgcaaaccctgggtgcagaagtggagtgtgtgaacttagtcactataacactgggctggccccaagaaattttgatctttatttaatttcacaaaagacattgaagggaatacaattcctagcctgcatcaaagttgtcaaagccttctctactccgccattcatttcaaaccctgaattaatctcaagctttcctcagaaggaatcactaaatgtctccctagtcccagcttgtgaggcctttcttatccattcagtattaaacccaaacaccaaactttttgttatttagatcaagttaatttctctatgtccactctcttttcttctgtctctcagtattttctctatctaccagttctttggattctaccttaaaaaaaaagttcagcgtgaactagcaaatctagcaaaggctgcatgacattttttttctatcccaaacattttttttttctatcccaaacagtgaagaggattgaatattatctaggttactttcaattgttaagcttgccactttattttcacagccagaagtgatgaaacgtcaaattcctcagtgtatattgttagtgaaagcatcatggtcatcatcagagttatcaccaccacagacatcaacatcctccctcttatcatcatcagcactgttgctattcactttttaattagttactatgtgccagccatcattctaaatcttttacaagcacttcctcatgtctgtgggatgatgagttccacaataatctagaaaccaattccttctttttcatatgacttccacctcatggctcaggatgagttcaccagcttcagcatcatgtccacattgtatccaacagcaaagagggataagagaagtagaaggcacatctctttttaaagttctaacctacaaattgtacgtttctttttcttacatctaattagctgaactttagggtttttattataaaagaagatatagcaggacacctggaagccactactaaaggaatcttgtcatattctttatgcatctttcagcatgtggcacagggcttgatataaattttgtgctcaacaaaagaataaaccctgagatgtcagaatgtccatgaggaactgttgacttcatcaaagtttcatgaagatacaaatttttttgctgagctctgaagactgagatttgattgggtagagatggggagtaggcaatacatgctgcagtttcctatgaggaatgggaggggtaggtgtaagtgtgttatttatgaaggtctgtgaggagaggaactcagctaaattctgctagttgcatggaacaggataagatattgacaagatgttcttgatcaaagtttagttaggctcttccgaaccctcatctcacctaggccttgacctttggactttctgtgtctgtctttatatttcccagttttagcaagaatgctgttaagtcagttcatccagattccccaccctcgatatctgatcaccctcaatatctgatcaaattcctcatgtcttcccaccccccaggtgatatctgatcgttttgggctttagttagaatcctgttagatctgtttaagcagattgcgccctcaccccagatgtttcctcttagcaattctttacccaccaacccctgtccccaacctgctctttgtctataaatccccacttgtctttattcagatttgtacacagttctatcctgagatctcttttccattagtgcaggagttccacaataaaatctatttttacctttttaactactatctagctctggatttctttgatgatacttagggactgtcaagactgggaaggtctctaaatctagagaatagaactttgacttaattttctagaggaaatagtgagctgttataggttcttgattacaggaattccataacgcaaatcacctcctaagctgggtctggccgcagtatgtaagatgattaaagcagaggaagcttggatagagctaggggagagagactttcttggtatttaaatataaacagatggaaacttgaatgaagtaggagtagagggactaacaaagcatctttaaaggaagaactgttttttttttctttatttattgaatccaaagaagagtgagcagttgaagatgatgtcaagttgtctagtcttggaggtttggataatgacagtgctgattctaggagaggggaagctagaacaaaaatacacatgtctttgggagaagataatggacttattgaacatgggatcggaattgaacatctaatttgaggtgtctgaatgtaagtgcaaacgtggagtaggaggtgcaaatcagaggtcttgaaatttggcctgcagacgtggggattgagctcggcgaaggggtattacctaacagcaataccctcactgtctttgtacaaggcgcaagtttgtcgtggagctagaagtctcctggtgacagtgcaagtacctagacttattgctgtctgacctccagctgaagttaatagaggtgcagttctacatgcggccctcctactgcacgacaaatcacttcagttgctgaggtaactggatttacttttgttcttcattttttccaaactagttttggaacttctgacagaactatgtgattattcaaggctccacctgagtttttgcagcgaatctaagaggacttctgtgtcagccaccctgaacctacacgtttgttttaataataagatactgatcaggattcaataatctgttgcagcatctcataggagttacattttctaatcctttttggtccaaagttgtaagactcgactcctcacttaagaggcagccagagtaactttttaaaaatgtaaatgtaattcctgtgatcaaacacacccaatgttccatttactttgttttcatgataaaacaagttctcactgactacaaggctctgaatttcccggtcccagttccgtctctgacctcatcttccacctttagccactcccctgtcagcctcaaggcctccactggacgttgacttcttgtgaaatgttcttcccccagctgcaccaatggctcccttcctcctgcttctgtcaagtctcagtgagttcttccctgacaaatatataaaacatggcatccgcgccacccccatcacttattgttcccccaacctgttttattcattcttataggatttactacaacctgatatgctgtgtgtttatttgcacattgtctcactcctcctgcccaagagaatacaaacatataagggtactgattttggcagttaatataaacagttaatataagctgaattcgaatgcaaagaacagtgtttggcacatagtaaccatcaatatatgtttgataaatgaatacgtttgaatgaacaagtcttgaggtgagttccaattctttggctcaatagtaaatagtttacttcttttattacaaatcactacttcaagcttgagttcacaaatgagccctatccttcagtcttttgtaacatcccaaccaggagtggtagctttctcctctgatctgctatatctaattctaacatgcctttctatatgtgaattatggctatgtggacttgtgtttgttactaaaacaacgagtgtgagtttcatcatctgaaaagtagataatgccatctctctcatggtgtgtgataaatgaagataaatgagataatctaagcatagtgcttggcatgtgctctgggcatttcttccgtaagtgttgcctataattttcaactaagttgcaggctgttgaagagcagacatcctgagtgtggacgtgggggtagggcgatggtatacttcacatggtaatggtagctgaggttgatgtacaggatgaattctgattgtacgcatggaagtggatcttgacttgttttttttttttagtactgatgattgcacagtcttcagtaactccagcagtgtgagaatatccaacatatgcaaggactggagattttgtttcagtcttgaaaacattctgggcctagactctggttattgatgatttaggttgctctcatccagctgagagaaggatgatatgttagtttttgggcttaaaaagatattcaaatgtaaccttatctgattcccagattttaggcctgtcagaattgaaactcaaccttaactagttaataatcatcaccaagcattgcttttgaaaccctcccatggataagctgttcaggatgcaataatacaccataagtctcctgaattagaaaaatgtattagagaagtggaggggaatcccttgactcagaggacaggagatataaagccggagcaggcaacagaggacctcttgaggaagactgaagacttgccacacaaaatccaggagagctttctgcttgtcacctcatgtaacattcacctctcaaagtcaaagtctcacaggattttattggctcaagcctctttagctttgtctccaccagatgtgtcaccattacttatccttgtgctaggtactcggtttaaaggaagacctaagtctttagtgggaacaactcaatccaatccttccaaacccgcagtgtgatgtaagttaattaacactcaacctcttaattttaatcaaaaagcacagcaaaacttcccagtgaccgtaattcctcactattggtccaaaagaagaatgttttccaagtccgggtgtggattggatgattgtactacttctgtggcatggctgaacgagtgtgaccccaacttcatatactggaaatgagcgagccgagaggttcactgagtttccaactcacacccaaggaaaaggttatgttccagagcgctgacaagggcgtggccttttcccagtacagtcatcccctcccctttcagaatcagaagccacttaccatgaatgcttctctcccaaacttgctatgacaaaagcagtatatatgtcagtctttttggcacattgaaatgtgtcactaacagccagcacatatttttgtaggtgagtttaaggttaacttttccctttcagcatataaatacttcacttcatcatttctcaaggttaggtaataataaaccaaaaagataataacttctagagaattggctggtgcaagatttaagctaattaaatagacatggttcctggtgtcttgaaattgtgtctaaatagaaaatatagataaaggaaagcatattgagagacctaaggccttctcttcattcatttaagcaagacattactgaacgtttaatttgaggcaggcaccgtgcagatgcctgagcgtaactgactacttggaaaaacaaacgtgctcacagagaggcacagaacaaaacagaaggtaacaagcgccatattgggttaataagcaatgtaaagggagaaaggagagaaaggaaaaagaggctttcatgacatccagcccctattttttagttctgttcatcacagtggtaattgcttatccaatgcctgtgtctcttctgaaatatgaactccagaagggcagaggtttgtgcagtttttctcttttgtattaccagcacctagtttcagggacagatttcacaaaggccttcagcctgggtctgccagggtaacacagacctcggaaactgcctggaagatcccctttaatatacgtttcacagcgagcgctcagggaattgtggggctgttgacagttactttcaccagataggtgcatagccagagtctacagagcagtagggagaggccaagagggcaccaaaaaatcccatgggaatggcaaacggagctcctcagagcagctgatgaaattctcgccctgctcgggcagtgcagactgcggtgggatatcttcatgggaattggtgactagggatgtttgctcttcctataaagcttatcccactcagccccctgctttgtacagctgcgtcatacagtcaagttcatgaatcctttattgacagtaaaggaacttgtagtcttttcctttgcttatgaatattttccctcagggtcagtcaccacttactagcaccaatccagacacttaattaagtgttcaataagcagtttttggatgcatgcatattagatggatacattttctgattatagaagtcctttatgggcatattaaaaatttagaaaatgtgaaaatgcaatgaagactgttaaagtctactcaaacccctgcaagcaacgtcaaacttggatagcatttgttatgtcattctagatatttttgtgtgtatacatgtgaatatgtataaaatgcaaagaaacaacactctgggaacatagggaagctgtcccctgcttttcaaaatactctaagaagaatatgtttgaaaggaaaagcttgggcttggttagatgtaatggtttgccttataatcatcaaaatgtctctgacatttatttcttgattatttgatttgccaaaggttgagagagatatattaaagactcatacaatgatagtggttcccagatttttccattatttctaacatctttttgatatctagggtaaaaatgtcaatggctgttcaccttaatttttgattgtgtctttgattgtgtggcagtgcttggaactgtttgaaattgccatccctagtatagactttggtttgactttggtgaatatttgttttttatttcaactttcctgtaaagtttagatacatttaaagcagtttttttctttacagcttagtttcctcatctataaaatgggaacaaaagcagtactgcctgagacgtttcctgtgaagactggaatgaaccaacacctgtaacatacccacaacaggcctggctgtcaataaatgctcgccattactaccttcagtgtggcagtttgctcattttttttatattttacctcaataagtatcctggaggatccttgtcctttaagaaatcattttaatccttcccctttattattagagttgattagtttcaatgtctttaattttatttaatcctttaaaataactacactctcttcattttctgtcttcagctctgtggatcatgtttacatatttgcatttgttttgtggagatctggaaaatatacatcccattttaaacttttggtttaaactagtagtttatttttaaatttttaaaatatgttttcagactttctttctatgattatcaaaacaaagagaaaaaacttttttctctgccttctgtcagaaacaatttagtatattttgtccactttgctgccttctatcgtccagttatgttaatataatatatgaatttggatgtcaattgttgccaaaagtggtgagttttatattgtctctcaatgatgatttttgatgtctgctcgccttgtgttaacactgttgatgatagagatccaatatcatcccttatttctgtgctaactacatctcttttacaaaattctttcctgttattgatcccctgattttgactcattccaatgttggctagagaatgtcttcagctctttttctcctatttaaccatgtgggtgtttttttttttttttctgagactttgcattattttagaatttctttcctttggctttacacaccagtgaaaacttgcagggtataaaaatgtatggatcacaaacttttctttcatcacagttttgtgaatgtttcttcagtatattctggtatttaatgttataggaaagtctgaggacgcctcaattttgtccctttttacacgcctttctattctcatttttgcatatttgagtgtaggaattttttctctattataattaaaatttctccacatgaattgtctagatgtcttattctttttatgtcttgcctcaaatgcgctgatgtcattttatctaccatcttaagacatattttacttgctaaaaatttctcttcaaatatataggtgcttctttctctgctcggttgtcctggttccctctgagggactgaatcctggccttgggtggtttttctttttctttcctccacatctgtcaacgtctcttccatgatttcatcctcacaatcctccttcatccatttcccaatgatgtataaaccacccctactgatttaatgttctagtgtccatttttaccattaaacttatctatgtagatttttattttattttaattttttgaactgtacctttcttactttactccctgattcagcttgttgtctttgtgtatcatgtgtttattttatactatcatgcttctgttttatatcatcctattatccctctataggcctatgatttctgctcttttcacagaggccatgaattcttgtggctcgctaagctaatgatgttgtaatacttttttattatttggcctgtataattctctctcttgtttaggaaatgtcacagaaccattctttttgggaatcagttcctcacctcctaactcttcccctccatcaatgtagtccaaacggaagctttcatcttcaagtttgcacctcctttctctgtgaacttcagccacctctctagctccatcacttacgctagactaatttccggaagtccatgctcctgatgagttatcgtcctgcctatactcctctgacaggagaaatgtcatcctggtttttattttatgctttctcatgaggaactgaaacaccaagctaacctgccttctctctctcacccagaattctgttgaattgtcttgttatactgcagacttctttgtgtataagtgagctaaaaggcagtgaatgaatgagcaataaagtccattttctctttctttcagctagatagggccactctggcttataaaggtgcattatgagacagcctgttatagattttcttaacttggggccatctgtcttaaattttgtgaaaatactgctcagattctgagagtaggttgccagtccaaatgagtttcgggtatttttgtgagtatttctgtttgtgtgcattcagatgtttgaatgcatggcttttccatgggaagttggaaagactgcaatgggggctaccagccaaagtccattttccaagagaaatcagttctattggagatggtggtggtggaggtaataggagagtgagagagcttcatggacatggtgctattttaacttaagggatttgaatggtttataaaattgagagtctgtgaaggaggaaaggcatttcagatcatacatgattatctgagtactggttaagtaagtgaaaaaacagggaaaaggaaaaatcccaagagatgactggatatatttgaggttttataaatctatgtaatcataatcatattgtaagctagaacttgctaaaacaggattgagtctgaaatatttaaacatgcaaagaccatgtattttgatgtgtgtgtacgaacactaaataaagcagtttcgagcttgtctatattcagtgtactacagagcaatttgtggtttgcataccctcttaaataaggacaaatacttctctgtttatgtggtttggtcagtggaatctttgtaattagatgtataagctattcctgtatcagcaatttgaagaagctccgataattttatttgcaaatttgacttttaaaaatgtagcagcactctcaattcttcatattctccacttatgttattttattgatggtcatttgcttcttgttgcttataaatggtgactttatttaaaactgtgcctaatgcattttggtagtaccaaattgttcagtcgttaaaactggtgacattaagtcatattgctttcattgcaatggttgctaagaaaatcatcagcttaagcaataccaactgtatttcaatagacaaattaatcttttcttgaaagcctcgtctaatctcccttgttcaacaggaagttttctgccttgtaggcatttgtgatcttttggcagtaaagaagaaatatgatctttataagtagaactttaaatgattttttaagagtagaaacgcataaatgttctaaaaataagattgactctacttgaatgcaagtttcaaagggaatggatttataaagtgtttatttcttctagaaataccatttggcagaaaaagcactttcttatagcaggcagagaataggatcgtgaggcaaccatggcaaaactttaatttattaaaaataatgtttgtattttttcagacttctgaccttgaacaaaaacctgtatctagattttcctatctatgaaacgtgctcattctttttaccttatttggaagacagttatggagattaatgatggcttttcagttaagttctgtgtaacttcttttaacaagagagtatgaatattttactcttcagtgaaggcagtgcaaactgaagtagtggctcagccagttatactgtcagctgtcgcctctcactagacagggaggttcaaaggaaagttttttgggtgtgccttctcggtttgcaacaatttcctgaggacgatctcaaaacaagtcattctgttcctaattactctgtgcaagctgtctgtctgctcttattgtttcccaggaatccacagccaaagaagcatatttgaagtcctgtctcagtgtgcatggaacatttccagctgtgccacacaagctcaagtggcagaggcttgtatatcctctccccaccgtctccccaacttacaatttccagcaagcaagcatcagtaccatcccaatagaccaactgtaatttagagttttatgtcctatcttgacatttcatgtgaagtaaagcttgagggaactactcactgtgaactgtggtataatgagatgcctcacagacatgttaaaagatggaaaatattatctctctggaagtctgaagtttgaactcaagtgtagacactgaaatgcagaagtgaacaggaaagacgtgattcttgtaaacatggtgcttccagccaagtaagaagacgtacaataaatggataatttaaagtgttcgagtaagatgggatccaggttttataggcagactctgaagcttatacaattttgcaccctttattaaaaaaaaaagaatacaaacttaagtatgaaaatgaatgcttattttgaaaacaaaaaatataacaaattggaaatttaaaaaaactgacaaatcacaaatgtaacaaaatccagaaaaatagcatactacatttattaaataactacccaacacattgctaagtatcctttcatttttcttcatttctttgctgtatactcttgagctccttctttatatgacagtgattttggacagttatcttaaagagtggttattaaaacaatgctttttgtttagagtgttgagatgcataaaatatgcaaattcacactcagaacatcaaattgtttatattactattacaggtttaggctctacaaacaaagtttttgatgaattgtgttttgcacacaaatttgctttgcaagatttttgttacctgaaatccacttcgaagaatgaatgttaccatatagtaagctcagggcacaatgaacgctatatactatatatcaagggaggggagggaaccacatcttttcgcatgagaaaagcctgacttggattctggaaatttgaagaaggaagaaagaaaactcaagaggaatgaggggaaaaaacaaaccaacaaatacaagaagagaaatggagaaggaggaacaatcggaatgaaaaagttagtgacatttttttaggctgtgctaagcatttaacatggacatctcgtaaaattataaggccttgagataaattttattttcctgattttacagattagaagactgaggctcagaaattttaaataacttgctcagtttcacacagttagtgaaagttgaggccagaattcaagcccatgttggcctgattcagattattcattcagtaaacgtttgttgcaagcatgctgcaatgacatcctctaagcactggggctataagaatacataaaatatttttgtgctttcaagtcagttactgtttcccacggacagtgcttaaagaatcagtagttccttaccaggtagagaaaggagaaaagcagttctaagcaatgaaatatgcatgagcaaagacaaaatagtctgtgatagggagaagtatcaggaatgatttcctcaaacgttggagtggaggtggtgttggtattagtaccccaaggtgcccacatcttatgagtcatggagtgcacaatttgtcgtgtcatgccttctagcattcttggctttcttttactattttcattcttggaggagtatctctatattgtaggaaagaaaacataaacaacaaaactctattctagctcttagagatttccataatgtatttgtcaaatcagattggatggtggatattgatgcagggggttgttaattcaaattaactgttgtcacttctcagtgtgtagacattggtatagttccctaaaaggcatgaagcacttagtagcatgtcatgatcccagtgcatgctttcaacgaatttaatgatggtgatgaagatgaaagtaggtgctgcaataatgcacatttaacaatatttgttccattagtgtaagccttgattatgtgaaatgtgaggacaatagtagacgccattttgatttgcactctaggacaagtaaaatagttgcatgtcaaccagaaagagatatgtagaatgtgttaaaccaatcttgtcatttaatatctgatgaattacgagttatcacccttcctaaaatatgtcagtttcttctggtagcacactaggtattgtagttatagccggcagaaattgctgtctaaatgtatgctcaatttaacaactgtctgttaaagttatcaacacattcctacatccattatacaaaagaaccccttcatgcattaa

SEQ ID NO: 33 - DNA, 12405 bp, Equus caballus
atggcgcactccggctctggcctacagagctttttgatgcagctgcaggagtccttgtccgccgcggaccgctgcagcgccgcgatggccggttaccatctgatccggggcctggggcaggagtgcatgctgagcaccggccccgctgtgctggcgttacagacttccttggttttttccaaagattttggtttacttgtatttgttcggaaatcacttagtattgatgaatttcgtgattgtagagaagaaatcctaaaatttttatatattttcttagaaaaaattggccagaagatcacaccttattctcttgatattaagaatacttgtaccagtgtttacacaaaagataaagctgccaaatgtaaaattccggccctagatcttcttattaagttacttcagactttgagaagttctagactcatggatgaatttagagttggagaattatttaccaaattctatggagaacttgccttgaaaacaaaaataccagatacagttttagaaaaaatatatgagctcctaggagtattaggtgaagttcatcctagtgagatgataagtaattcagaacaactgttccgggcttttctgggtgaacttaagtcccagatgacatcaacagtaagagagcccaaactacctgttctggcagggtgtctgaagggattgtcatcacttatgtgtaacttcactaagtccatggaagaagatccccagacttcaagggagatttttgattttgcgttaaaggcaattcgtcctcagattgatctgaagagatatgcagtgcccttagctggtttatgcttatttaccctgcatgcatctcaatttagcacctgccttttggagaactacgtttctttgtttgaagtgctgtcaaaatggtgtggccatacaaacatagaattgaaaaaagccgcacattcagctctggagtcttttctgaaacaggtttcttttatggtggcaaaagatgcagaaaggcataagaataagctgcagtactttatggagcaattctatggaatcatcaggaacatggattcaaatagcaaggatttatcaattgcaattcgtggatatggactttttgcaggcccttgcaaggttataaatgcaaaagatgttgacttcatgtacgtagagctcattcagcgctgcaagcagctgttcctcacccagacagatactgttgatgaccatatttaccagatgcccagtttcctccaatctattgcaagtgtcttgctttaccttgatacaattcctgaggtgtatactccggttctggaacatctcatggtggtacagatagacagcttcccacagtatagtccaaaaatgcagccggtgtgttgtagagccatagtgaaagttttcctagccttagcagaaaagggaccagttctctggaattgcattagtactgtggtgcatcaaggtttaattagaatatgttctaaaccagtcgtctttcaaaagggtgctgggtctgaatccgaagactatcatacatcagaggaagctagaactggcaaatggaaaatgcccacatacaaagactatttggatctttttagatatctcctgagctgtgaccagatgatggattctcttttagcagatgaagcatttctctttgtgaattcctcccttcatagtctgaatcgtttgctgtatgatgaatttgtaaaatcagttttgaagattgttgagaaattggatcttacactagaaaaacagaatgttggggagcaagaggatgaaactgaagctactggtgtttgggtgatcccgacttcagatccagcggctaacttgcaccctgctaaacctaaagatttttcagctttcattaacctggtggaattttgcagagagattcttcctgagaaacatgtagaattttttgagccatgggtttactcatttgcgtatgaattaattttgcagtctacacggttaccactcatcagtggtttttacaaattgctttctgttgctgtgagaaatgccaagaaaatgaagtattttgaaggagttggtccaaagagtcagaaacagtctcctgaggacctagaaaagtattcttgctttgctttgtttgcaaaatttagtaaagaggtatcaattaaaatgaagcaatacaaagatgaacttttggcctcctgtttgacctttattctgtccctgccacatgacatcattgaacttgatgttagagcctacgttcctgcattgcagatggcttttaaactgggcctgagctatactccattggcggaagtaggcctgaatgctctagaagaatggtcaggttacatctgcaaacatgtaattcagccctattataaggacattctacccagccttgatggatatctgaaaacttcagtcttatcagatgagaccaagaatagctggcaagtgtcagcactttctcgggctgcccagaaaggatttaataaagttgtgctaaaacatctgacaaagacaaagagcatttcatcaaatgaagcactgtccttagaagaagtgaggattagagtagtacggatacttggctctctaggaggacaaataaacaagaatctcgtaacagctgcatcatcagatgaaatgatgaagaagtgtgtggcatgggacagagaaaaaagactccgttttgcagtaccatttatggagatgaagcctgtcatttatctggatctattcctgcctcgggtcaccgagttagctctttcagctagtgacaggcagactaaagttgcagcttgtgaatttttacatagcatggttatgtttatgttgggaaaagccactcagatgcctgaagatggtcagggttccccacccatgtaccagctctataagcgaacttttcctgttttacttcgacttgcatgtgatgtagatcaggtgacaaggcaactgtatgagccactagttatgcaactgattcactggttcactaacaacaagaaatttgaaagtcaggacactgtcgccctactagaaacgatattggatggaattgtggaccctgttgacagtactttgagagatttttgtggtcagtgtattcaagaattccttaaatggtccattaagcagacgacaccacagcagcaggaaaaaagtccagtaaataccaaatcgcttttcaagcgactgtatagctttgcacttcatccgaatgccttcaagaggctgggagcatcacttgcttttaataatatctacagggaattcagggaagaagagtctctggtagaacagtttgtgtttgaagccttggtaacgtatatggaaagtctggccttagcacatacagatgagaaatccttaggtacaattcaacaatgttgtgatgccattgatcatctcagtcttatcattgagaagaagcacgtttctttaaacaaagcaaaaaaacgacgtttgccacgaggctttccacctgcgacatcactgtgtttattggatgtggtccagtggcttttagccaattgtgggagaccccagacagaatgtcgacacaaatccatagaactcttttataaatttgttactttattgccaggcaacaaatccccttttttatggctgaaagatattatcaagaaagaagatatttcctttctcataaacacatttgagggcgggggaagaggttgtgatcggccgtcaggcatccttgctcagccaaccctcttccatttgcaagggccgttcagtctcagagctgccctgcagtggatggacatgcttctggcagcactggagtgctacaacacattcattgaagagaaaaccctggaagcacccaaggtcctaggtactgaaacacagtcttcactttggaaagcggtggctttctttttagaaagcattgctatgcatgatattatggcagcagaaaagtactttggcactggggcaacaggtaacagacccagcccacaagaaggagaaagatataattatagcaaatgtacaattgtggtccgcattatggaatttaccacaacgctcctcagcacctccccagaaggctggaagctgcttgagaaggatgtgtgtaacacaaaccttatgaaactcttagtgaaaaccctgtgtgagccctcaagcataggtttcaacatcggtgatgtcgcagttatgaactatcttcccagtgtttgtaccaacctgatgaaagcactgaagaagtccccatacaaagacatcctggagatgcacctcaaggaaaagataacagcacagagcattgaagagctctgtgcagttgacttgtattgccctgatgcttgcgtggacagggccaggctggcttctgtcgtgtcagcttgtaaacaacttcatagagcggggtttttgtgtgttataataccatctcagtctgcagatcagcatcattctattggcacaaaacttctttccttggtttataaaagcattgcacctggagatgaacaacagtgccttccttcactagatcccaattgtaagcgattggccagtggacttctggagttggcctttgcttttggaggactgtgtgagcaccttgtgagtcttctcctggacacgacagtgttgtctatgccatccagaggagggtcccagaaaaacatcgtcagcttctctcatggagagtatttttatagcttgttctcagaaacgatcaacactgaattgttgaaaaatctagatcttgctgtattggagctcatgaaatcatctgtggataatcccaaaatggtgagcaatgttttgaatggtatgttagatcagagcttcagggatcgaaccagtgagaaacaccaaggactgaaacttgcaactataattctgcaaaactggaagaagtgtgattcatggtgggccaaagattctgctcctgaaagtaaaatggcagtgcttaccttgttggcaaaaattttgcagattgattcatctgtttgttttaatacaaatcactgcatgttccctgaagtctttacaacatatgttagtctacttgctgattcaaagttggatctgcatttaaagggccaagctataattcttcttccattcttcaccagtcttactggaggcagccttgaggaccttaaggttgttcttgaaaacctcatcgtttctaattttcctatgaaatctgaagaatttcccccaggaactctgcagtacagtaattatgtggactgcatgaagaagtttctagatgcattggaattatctgaaagccctatgttgttgcagttgatgacagaaattctttgtcgtgaacagcaacatgttatggaagaattatttcagtctactttcaaaaagattgccagaaagagttcatgtatcacacaattaggccttctggaaagtgtatatagaatgttcaggagggatgacctgctttcaaatatcactcgccaagcatttgtagaccgttctctgctcactctgttgtggcactgtagcttgaatgctttgagggaattttttagcaaaattgtggtggaagccattaatgtgttgaagtccagatttataaagctgaatgaatctgcctttgatactcaaatcaccaagaagatgggctactataagatgttagatgtgatgtattctcgtcttccaaaagatgatgttcactctaaggaatctaaaattaatcaagttttccatggctcatgtattacagaaggaagtgaacttacaaagacacttattaaattgtgctatgatgcctttacagagaacatggcaggtgagaatcagttgctggagaggagaagactttaccattgtgctgcatacaactgtgccatttctgttgtctgctgtgtcttcaatgaattaaaattttaccaaggttttctgtttactgaaaaaccagaaaagaacttgcttatttttgaaaatctgatagacttgaagcgctgctacacgtttcctatagaagttgaggttcctatggagagaaagaaaaagtaccttgaaattagaaaagaagccagggaagcagcaagtggggattcagatggtcctcgttatatatcttccttgtcatatttggcagacagtagcctgagtgaggaaatgagtcaatttgatttctcgactggagtgcagagctattcatatagttcccaagaccctaaatctaccactgctcattttcggagacagaaacataaagagtccatgatccaagatgatatcctggagttagagatggatgaactcaatcaacacgaatgtatggcaactatgactgctctgattaagcacatgcagagaaatcagatcctccctaaggaagaagagggttcagtgccaagaaatcttcctccttggatgaaatttcttcatgacaaactaggaaatccatcaatatcattaaatatccgtctcttcttagccaagcttgttattaatacagaagaagtctttcgtccttacgcgagatactggctcagccccttgctgcagctggttgtttctggaaacaacggaggagaaggaattcactatatggtggttgagatagtggttattattctttcatggacaggattagctactcctataggtgtccctaaagatgaagtgttagcaaatcgattgcttcatttcctaatgaaacatgtttttcatcaaaaaagagctgtatttagacacaacctcgaaattataaaaacccttgttgaatgctggaaggattgtttatccatcccttacaggttaatatttgaaaagttttccagtacagatcctaattctaaagacaattcagtaggaattcaattactaggcattgtaatggccaataacttgcctccttatgacccaaaatgtggcatagagagcataaaatactttcaagctttggtcaataatatgtcctttgtaaaatatagagaggtatatgcagcagcggcagaagttctaggacttgttcttcgatatattactgagagagaaaatatactggaggagtctgtgtgtgaactggtcataaaacagttgaagcaacatcagaatacgatggaggacaaatttattgtgtgcttgaacaaagctgtgaagaacttccctcctcttgctgataggtttatgaacaccgtgttcttcctgctgccaaaatttcatggcgtgatgaagactctctgtctggaggtggtgctgtgtcgtgcagaggaaataacagatctatacttacagttaaagagcaaggatttcattcaagtcatgagacatagagatgatgaaagacaaaaagtgtgtttggacataatttataagatgatggcaaaattgaaaccagtagaacttcgagaacttctgaatcctgttgtagaattcatttctcatccttctccagtgtgtagggaacaaatgtataacattctcatgtggattcatgacaattatcgagatccagaaagtcaagcagatgacgactcccaggaaatatttaagttggcaaaagatgtgttgattcaaggattgatcgatgagaaccctgggcttcaattaattattcgaaatttctggagtcatgaaactaggttaccttcaaataccttggatcgattgttggcactaaattccctatattctcctaagatagaagcacactttttaagtttagcaacagattttctgcttgaaatgaccagcgtgagcccagattattcaaaccctatgtttgagcatcctctgtcagaatgcaaatttcaggaatatactattgattctgactggcgtttccgaagtactgttctcactccaatgtttattgagactcaggcctcccaaagtgctctgcagacccggacccaggaaggatccctctcagctcgaggggtaatgactgggcagatacgggccacacaacagcagtatgatttcacacctacgcaaaatacagatggaagaagctctttcaattggctgactgggaacagcattgacccactggtggattttacggtctcctcctcatctgattctttgtcttcctccttgctgtttgctcacaagaggagtgaaaaatcacagagagtacccttgaagtcagtaggacctgattttgggaaaaaaaggctgggccttccaggggatgaggtggataacaaagcaaaaggtacagacaatcgggcagaaatattaagattacggagacgatttttaaaggaccgagaaaagctcagtttgatttatgccagaaaaggtgttgctgaacaaaaacgagagaaggagatcaagagtgagttaaaaatgaagcacgatgcccaagtcattttgtacagaagttaccgtcaaggagaccttcctgacattcagattaaatacagcagcctgatcactcccttgcaagctgtggcccagagagacccaataattgcaaagcagctctttggcagcttgttttctggaattataaaagagatggataaatataagaccatgtctgaaaaaaacaacattactcagaagttgctccaggacttcaataattttcttaacaccactgtctctttctttccacctttcatctcctgtatccaggaaattagttgccaacacgcagacttgctgagcctcaacccagcttctgtcagtgccagctgcctggccagtctgcagcagcctgtaggcgtccgccttctggaggaggccttgctccacctgctgcctgaagagccacctgccaagcgagttcgagggagaccctgtctctaccctgattttgtcagatggatggaacttgctaaactgtatagatcaattggagaatatgacatcctccgtgggatttttaatagtgagataggaacaaagcaagtcactcagaatgcattattagcagaagcaagaaatgattattctgaagccgttaagcagtataatgaggctctcaataaacaagagtgggtagatggtgagcctatggaagctgagaaggatttttgggaacttgcatcccttgactgttataaccaacttgctgagtggaaatcactggcatactgttctacagtcagtgttgacagtgcgaaccctccagatttaaataaaatgtggaatgaaccattttatcaggagacctatctaccttacatgatccgcagcaagctgaagctacttctgcaaggtgagggagaccagtccctgctgacatttattgatgaagctgtgagcaaggagctccagaaggtccttgtagagcttcattacagtcaggaattgagtctcctttatatcctacaagatgatgtcgacagagccaaatattatattgaaaattgcattcggattttcatgcagagctattctagtattgatgtccttttagagagaagtagactcaccaaattgcaatctctacaaactttaatagaaattcaggagttcatcagctttataagcaaacaaggtaatttatcatctcaaattccccttaagagacttctaaaaacctggacaaacagatatccggatgctaaaatggacccaatgaacatctgggatgacatcatcacaaatcgatgtttctttctcagcaaaatagaagaaaaactgactcttcctccagatgatcatagtatgaacacagatggagatgaagattccagtgacagaatgaaagtgcaggagcaggaggaagatatttattctctgattaagagctgtaagttttccatgaaaatgaagatgatagaaagtgcaaggaaacagaaaaatttctcactagccatgaaactattaaaggagcttcataaagagtcaaaaacaagagatgactggctggtgaaatgggtgcagagctactgtcgactcagtcacagccggagccagacccagaatcgtcctgagcagatccttactgtgttgaaaacagtctctttgttggatgagaacacatcaagctacttaagcaaaaatattccagtttcccgtgaccacaacattctcttgggtacaacttacaggatcatagctaatgctctcagcagtgatccaacttgccttgctgaaatcggggaaagcaaggctagaagaatcttggagctgtctggatccagtttagagaatgcagaagaggtgatcgcaggtctataccagagagtgttgcatcacctttctgaggccgtgcggattgcagaggaggaggcccagcctttcactagaggccaggaacctgcagttggggtgatagatgcttacatgacactggtggatttctgtgaccagcagctccgcaaggaggaagagagttcatcagttactgagtctgtacaactgcagatgtatccagcccttgtggtggacaaaatgttaaaagctttaagactgcattccaatgaagccaggctgaagtttcccagactactgcagattatagaacagtatccagaggagaccctgagcctaatgaccaaagagatttcttccattccttgctggcagttcattggctggatcagccacatggtggccttactggacaaagaggaagctgtcgctgtccatcgcacagtggaagagattgctgataactatccacaggcgatggtctacccatttataataagcagtgaaagctattccttcaaagatacttctactggttataagaataaggagtttgtggaaaggattaaaattaagttggatcaaggaggagtgattcaagattttattaatgccctagaacagctctctcatcctgaaatgctctttaaggactggactgatgatatcaaagttgaacttgaaaaaaaccctgtaaatagaaaaaacattgaaaagatgtatgaaaaaatgtatgcaaccttgggagacccacaggctccaggtcttggggcttttcgaagaaggtttattcaggcttttggaaaagaatttgataaacactttgggagaggaggttctaagctacctggaatgaagccccgtgaattcagtgatattaccaactcactattttcaaaaatgtgcgaagtctcaaagccacctgggaatctgaaagaatgctcgccctggatgagtgacttcaaagtagaatttttgagaagtgaactggagattcctggtcagtatgatggcaagggaaaaccagtgccagaataccatgcacgaattgctgggtttgatgagcggataaaagtaatggcttctatgagaaaaccaaagcgtatcatcatccgaggccatgatgagagagagtaccctttccttgtgaagggaggtgaagatctgaggcaggaccaacgcatcgagcagctcttcgaggtcatgaatgtcatcctttcccaagatgctacctgtagtcagagaagcatgcagctaaagacataccaggtcatacccatgacctccagattaggactaattgaatggattgaaaatacttttaccttgaaggaacttcttttgagtaacatgtcacaagaggagaaagcagcttgtacaagcgatcccaaagcaccaccatttgaatatagagactggctgacaaagatgtctgggaaatgtgatgttggtgcttacatgctaatgtataagggagctagtcgtactgaaacagtcacatcttttagaaaaagagaaagtaaggtgccagccgatctcttaaagcgggcctttgtgaagatgagtaccagccctgaggccttcctgacactccgctcacactttgcccgctctcacgctttgatatgcattagtcactggattctgggcattggagatagacatctgaacaatttcctggtaagcatggagacaggtggagtgattggaatcgactttggacatgcatttggatcagctactcagtttctgccggtccctgagttgatgccttttcgtctaactcgccaatttatcaatctgatgttaccaatgaaagaaacaggtgttatgtacagtatcatggtgcatgcactgagagccttccgctcacagtccaacctgcttgctaacaccatggacgtgtttgtaaaggagccttccttcgactggaaaaattttgaacagaaaatgctaaaaaaaggaggatcatggattcaagaaataaatgtaactgaaaaaaattggtatccccggcagaaaatacattatgctaagagaaagttagctggtgccaatccagcagttattacttgtgatgagttacttctgggccatgagaaggtagctgcatttggagattatgtggctgtagcacgaggaagtgaagatcacaatatccgtgcccaagaactggagagtgacctttcagaagaagctcaggtgaagtgcttgattgaccaggcaacagaccccaacatccttggcagaacttggataggatgggagccctggatgtga

SEQ ID NO: 34 - DNA, 1834 bp, Equus caballus
cctcccctcgcacacttcccgtctctccgcgcgcgcccccgccttcccggtgagcctgtttggcgggaagttggcttagttggcctacctgtggctcagcgggttctctggtgcccgccttgtttctccccagaggcgtctcaatcctccctccatgatctcggcatagagcatagtaccccttcgcacggaggacgcgatggctcccaggaaacgtccagaaacccagaagacccccgagatggttgtgcgccccaagagcaagaggagcaggagccccagggagctggagcccgaggccaagaagctctgtgcgaagggccccggttccagcagaagacttgactcaggctgcctttgggcggagttggctagcctgcaggtcccgccactgtgcagcagcatcgtcagggccctgcaccagcagaagctgggcaaagcttcctggtcatccctacagcagggtctccagcagtcctttttgcgctctctggcttcttaccggatattccaaaaggctgccccctttgacaggagggccacatccttggcgtggcacccagctcaccccagcaccctggctgtgggttccaaagggggagatatcatgctctggaactttggcgtaaaggacaaacccaccttccttaaagggattggagctggagggagcatcactgggctgaagtttaaccctctcaataccgaccagtttttcacctcctcaatggagggaacaactaggctgcaagactttaaaggcaacactctccgagttttttccagctatgacacctgcaacttctggttttgcagcctggatgtgtctgccaaaagccgaatggtggtcacaggagacaacgtgggccatgtgatcctgctgaacatggacggcaaggagctttggaatctgagaatgcacaaaaagaaagtgacccatgtggccctgaacccgtgctgtgactggttcctggccacagcctccgtagatcaaacagtgaaaatctgggacctgcgccaggttagagggaaatccagcttcctctactcgctgccgcacaggcatcctgtcaacgcagcttgtttcagtcccgatggagcgcagctcctgaccactgaccagaagagcgagatccgggtttactctgcctcccagtgggactgccccctgaacctgatcccacaccctcaccgccacttccagcacctgacgcccatcaaggcaacctggcatcctcggtacaacctcattgtcgtgggccgatacccagatcctaatttcaaaagttgtaccccctatgaattaaggacgatcgatgtgtttgatggaagctcagggaagatgatgcatcagctctatgacccagaatcttctggtatcatttcgctcaatgagttcaatcccattggggacacgctggcctctgtgatgggttatcacattctcatttggagccaggaggaagctgggatgcagaagtgagagacattaatgaaggtgtgggccaagcagggcttggagccacacgagaacaagtcctgcaagaagaggcggctgtgtgttaaagggcaaaggtatccaagtcttagggttggagcaggggcactgtggcatgggacactatgggactgggacactggcatgtttctgttctggactcagctccagaaacttctctagagttggcgacccagctgctccagaggtctctgctgtatctaacctaaagccaagctacttttttcctttctgacgtgcagtggcagagcgatcaggtagtggtttccgatgtgtgttcactgttgacatggcaataaaagaatacccaactga

SEQ ID NO: 35 - DNA, 3073 bp, Equus caballus
cccccggggcgggctcagtgcgtggcagcgggactgccggccgcgtcgcgaagtttccagcctgccagcgctgctggctgcccggacgtccccagacctcggccatgcggcctctgctgctcctggccccgctgggctggctgctcctggccgaagcgaagggcgacgccaagccggaggaccatcccacgagagaaactccagctgcccatgacgaagcccacagagacaacctcttagtcctcacggtggccacgaaggagtccgaggggttccgacgcttcaagcgctcagcccagttcttcaactacaagatccaggcgctgggcctgggggaggactgggacggggacaaggagacgtcagcgggcggcgggctgaaggttcggctgctgaagaaagctctggagaagcatgcagacaaagagaacctggtcattctcttcacagacagctatgatgtggtatttgcctcggggccccgagagctcctgaagaagttccggcaggccaggagccaggtggtcttctcggccgaggagctcatctaccccgaccgcaggctggaggccaagtacccggtggtgtccgatggcaagaggttcctgggctctggaggcttcatcggttatgcccccaacctcagcaaactggtggccgagtgggagggccaggacagcgacagtgaccagctgttttataccaagatcttcttggacccagagaagagggagcggatcaacatcaccctggaccaccgctgccgtatcttccagaacctggttggagccttagatgaggtcgtgctcaagtttgaaatgggccatgtgagggcgcggaacctggcctacgacaccctccccgtcctgattcatggcaacgggcccaccaagctgcagctgaactacctgggcaactatatccctcgcttctggaccttcgagacgggctgcacggtgtgtgacgagggcctgcgcagcctcaagggcattggggatgaagctctgcctgtggtcttggtcggcgtgttcatcgagcagcccacgccgttcctgtccctgttcttccagcggcttctgcgcctgcactacccccggaaacagctgcggctttttattcataaccatgagcagcaccacaaggctcaggtggagcagttcctggcagagcatggcggcgagtacaagtctgtgaaactggtgggccccgaggtgcgggtggcaaacgccgatgccaggaacatgggcgcggacctgtgccggcaggaccgtggctgcacctactacttcagtgtggatgccgacgtggccctgaccgagcccaagaccctgcgactgctgattgagcagaacaagaatgtcatcgccccgttgatgacccgccacgggaggctgtggtcgaacttctggggggcaatgagtgcagatggctactacgcccgctccgaggactacgtggacattgtgcaggggcggcgtgttggcgtctggaacgtgccctacatctcgaacatttacctgatcaagggcagtgccctgcgggctgagctgcagcagacagatctgttccaccacagcaagctggatgccgacatggccttctgtgccaatatccggcagcaggatgtgttcatgttcctgaccaaccggcacaccttcggccacctgctctccctggacagctaccagaccacccacctccacaacgacctctgggaggtgtttagcaaccccgaggactggaaggagaagtacatccatgagaactacaccagggccctggcggggaagctggtggagatgccttgcccggatgtctactggttccccatcttcacggagacggcctgtgacgagctggtggaggagatggagcactacggccagtggtctctgggagacaataaggacaaccgcatccagggtggctacgaaaatgtgccgaccatcgacatccacatgaaccagatcagctttgagcgggagtggcacaagttcctggtggagtacatcgcccccatgacagagaagctgtatccaggctactacaccagggcccagttcgacctggcctttgttgtccgctacaagcctgacgagcagccctcgctgatgccccaccacgatgcctccaccttcactgtcaacatcgccctgaaccgggtcggggtggattacgagggcgggggctgtcggttcctgcgttacaactgctccatccgagccccacggaagggctggaccctcatgcaccccggacgactcacgcactaccacgagggactccccaccaccaagggcacccgctacatcgcggtctccttcgtcgatccctaatcggccaagcctggccacttcggaccttttcctcgttgccaacaaccactgcccagcagcctctggggccttggggtcccagggaacctggtccagcctccgggctcttgacctcccattgctttcggagccgccgtcggagagactgggccgcaggccagaggcagagcacacctccttggctggggctttcctggtgttctgctccccaccccgggagatggggtccacgctcactgccttgtaacagctcatcctctcccacctgttctcctgaaaagcccggtccctcttcctctgcctcttccatgggcccagacctgagcagaaccgggcttacccagctgcccagagagactctaggggccagaagccatgccccagagctcccaggcagggctgccacccgggaacttctgcttcaagcttcagggtagacacagagacctggatgagactcaagtcccctccctgatcctgggcctgctgaagccccttcctccatggctcctgtcatgagagcaaaacattgtcgcctggagacggtgactcggaaagcctcctgggagacaggaaaggcatcgatgccacagctccatcctctacttgacccttgctggcgggaggggagtgatatgtccacacactgcactgcgtcatcctgttccggatgcctccggagagagggacggacagtcagaaacaagggagtttctattaaaggccatccaaaccac

SEQ ID NO: 36 - DNA, 1601 bp, Equus caballus
agtttctgggagccagtcccacgagcaccagctcctctgtccccacccgggcgtcacgatggagctccaaaagaccccagccaggaatctggacaagttcattgaagactatctcttgccagacacacggttccgcaggcaggtccgagaagccatcgacattatctgcagtttcctgaaggagaggtgtttccgaggtgccgttccccctgtgcgggtgtccaaagtggtgaagggtggctcctcaggcaaaggcacgaccctcagaggccgatccgatgctgacctcgtcgtcttccttgactacctcacgagtttccgggagcagtttgagcgccgagcagagttcatcaaggagattcggaggcagctggaagcctgtcaaagagagaagaggtttgacgtggagttcgaggtccaggggcagcagtgggcgaggccccgcgcgctcagcttcgtgctcacgtcgccccagctcaatgagggggtggaatttgatgtcctgcctgcctttgatgtcctaggtcaggtgactacatcgtacagacctgaccctgacatatatgtcctactcatcaaagaatgccagtccctggggaaggagggagagttctccccctgcttcacggagctgcagcgagccttcctgaggcagcggccaaccaagctcaagagcctcatccgcctggtcaagcactggtaccaaaagtgcaaggataaacttgggaaaccactgccagcacagtacgccctggagctcctgacagtctatgcttgggaacagggaagcagacaaacagaattcaacacagctcagggatttcggactgtcttggaactagtcctgaagtaccagcagctttgcatctactggacaaagtattacaactttgatgaccctgttattggacaatacctgaaaaggcagctcaagaaacccaggcctgtgattctggacccggctgaccccacaggaaacgttggtggtggagacccacgcagctggcctcggctggcacaggaggcgagagcctggctgagttacccgtgctttaagaattgggacgggtctccagtgggctcctgggacgtggggcctgaagaagacagcgaggacgacactttgacctgggctgagcgcgcatattaccagtgcgaccacggacggcgccctgaattcccgcagaccggcagcacgccccagagggcatccgctcccgacgcggaagagaactggacctgcaccatcctctgatcgccggcgcagcgtggaggagaggactccagagtcgggggggccagccccctcatttcctgggcgggatcttatcggctgtgacttggcatcagtcctaggaccagaatccgggtctcctgacccctcttcctgctgttcccctctttctcgccctccctaggtagcgctgcccgcagcctcatcccgccacagcctgttttctgacaatattctctgagaggcaacagttgaggtttagacaaaagagtggaaactcagccttgactttcttctgtgtgcctggtgagaaggttatggtccaatttattatcaataacaataaaaataatagcagataaaaaaa

SEQ ID NO: 37 - DNA, 1352 bp, Equus caballus
cgccgcggacgcggacgggctgctggcggggcgcgggccgggtgcgggcggcggtgcggggacccctggggcggcggcggcgttggcggggggcgtgctgctcatcggcgcagtgctcgcggggaactcgctcgtgtgcgtgagcgtggcggccgagcgctccctgcagacgcccaccaactactttatcgtgagcctggcggccgccgaccccctactcgccctgctcgtgctgcctctcttcgtctactccgaggtccagggcggcgtgtggctgctgagccccggcctctgcgacgcgctcatggccatggacgtcatgctgtgcaccgcctccatcttcaacctgtgcgccatcagcgtggacaggttcgtggccgtggccgtgcccttgagctacaaccgccagagccggggcggccgtcagctgctgctcatcggcgccacgtggctgctgtcggcggcggtggccgcgcccgtgctgtgcggcctcaacgacgctcacggccgcgaccccgccgtgtgccgcctggaggaccgcgactacgtggtctactcatccgtgtgctccttcttcctgccctgcccgctcatgctgctgctctactgggccaccttccggggcctgcggcgctgggaggccgcccgccgcgccaagctgcacggccgtgccccgcaccggaccagcggcccgggccctccggcccccgacgccaccgcgctccggggcccgctgccccccgacgccatcccgccccctgggccacagcccccagacacaacccagctccccagggccatcacgtctcccaacgccatcccgttctccgacgccaatgcgcacccggacgcaacccagctccccagtgtcaccccggcctccgacgccaccccgccccccgacgccaccgcaccccctgacgccaccccgccccctgacgccatcctgtaccccgacgccactgcaccccctgacgccaccctgccccccgacgccatcctgtccccggatgccatcccgtcccccgatgccatcccgtgccccgatgccgtcgcacccctccacgccatcccggccgagcccccgctgcaggcccgcaggaggaggcgcgccaagatcaccggccgggagcgcaaggccatgggggtcctgcctgtggtggtcggggtcttcctgctgtgctggtcgcccttcttcgtcgtgcacatcacgcgggcactgtgtcccacctgcgcggtgtccccgcggctggtcagcgcagtcacctggctgggctacgtcaacagcgccctcaaccccgtcatctacaccgtcttcaacgccgagttccgcaacgtcttccgcaaggccc

SEQ ID NO: 38 - DNA, 1128 bp, Equus caballus
atgcaaaaactgcaaatctctgtttatatttacctgtttgtgctgattcttgctggtccagtggatctaaatgagaacagcgagcaaaaagaaaatgtggaaaaagaggggctgtgcaatgcatgtacttggagacaaaacactaaatcttcaagaatagaagccataaaaattcagatcctcagtaaactgcgcctggaaacagctcctaacatcagcaaagatgctattagacaacttttgcccaaagctcctccactccgggaactgattgatcagtacgatgtccagagagatgacagcagtgatggctctttggaagatgatgattaccacgcgacgacggaaacaatcattaccatgcctacagagtctgatcttctaatgcaagtggaaggaaaacccaaatgttgcttctttaaatttagctctaaaatacaatacaataaagtagtaaaggcccaactgtggatatatctgagacccgtcaagactcctacaacagtgtttgtgcaaatcctgagactcatcaaacccatgaaagacggtacaaggtatactggaatccgatctctgaaacttgacatgaacccaggcgctggtatttggcagagcattgatgtgaagacagtgttgcaaaattggctcaaacagcctgaatccaacttaggcattgaaatcaaagctttagatgagaatggtcatgatcttgctgtaaccttcccaagaccaggagaagatgggctgaatccatttttagaagttaaggtaacagacacaccaaaacgatccagaagagattttggacttgactgtgatgagcactccacagaatctcgatgctgtcgttaccctctaactgtggattttgaagcttttggatgggattggattattgcacccaaaagatataaggccaattactgctctggagagtgtgaatttgtatttttacaaaaatatcctcacactcatcttgtacaccaagcaaaccccagaggttcagcaggcccctgctgtactcccacaaagatgtctccaattaatatgctatattttaatggcaaagaacaaataatatatgggaaaattccagccatggtagtagatcgctgtgggtgctcatga

SEQ ID NO: 39 - DNA, 764 bp, Equus caballus
ccagcagccccctgacgagctataattgcttcgctccatcctgttgctgccattctcttggcggaggcatctggggttccaggcaggcggcagctgcaggcccaccgcccggctcgcgggatggactggccgcacaacctgctgttccttgtcatcatctccatcttcctggggctgggccagcctagaaaccccaaaggcaagaggaaggggcaagggcagtctgggcccctggcccctgggcctcaccagatgccgctggacctggtgtctcgagtgaagccatatgcccgcatggaggaatacgagaggaaccttgaggagatggtggcccagctgaggaacagctctgagccagccaggaggaagtgtgaggtcaacttgcagctgtggctgtccaacaagaggagcctgtcgccctggggctacagcatcaaccatgaccccacccgtgtccctgcggacctgccggaggcgcggtgcctgtgtctgggctgcgtgaaccccttcaccatgcaggaggaccgcagcatggtgagcgtgcccgtgttcagccaggtgcctgtgcgccgccgcctctgcccgctgccgccgcgcaccgggccctgccgccagcgcgccgtcatggagaccattgccgtgggctgcacttgcatcttctgaaccgccaaggccctgagctggtgggcagtggagacagccctccctgcgcccccatgccaagcagagccaatgaaaagtaaacgctgtcttttctaaagcaa

SEQ ID NO: 40 - DNA, 3010 bp, Equus caballus
cggctctgggggctcggctttgccgcgctcggtgcacttgggcgagagcaggaacgtggaacggagctccgatcccagcgcagccaccgcaatgagaggcgctcgcggcgcctgggattttctctgcgtcctgcttctcctgttccgcgtccagacaggctcttctcaaccatctgtgagtccaggggaactgtctccaccatccatccatccagcaaaatcagagttaatcgtcagtgttggcgacgagattaggctgttatgcgctgatccaggctttgtcaaatggacttttgagacctggggtcagttgagtgagaacacacacaaagaatgggtcacggagaaagcagaggccacaaacacgggcagttacacatgcaccaatgaaggcggcctaagcagttccatttatgtgtttgttagagatcctgcaaagcttttcctctttgatccttccttgtatgggaaagaaggcagtgatacgctggtccgctgtcctctgacagacccagaggtgaccaattactccctcatggcgtgcgaggggaaatctcttcccaaggacttgacgttcgtcgctgatcccaaggccggcatcacgatcagaaacgtgaagcgcgagtatcatcgactgtgcttgcgctgctctgcagacaaggatggcaagtcagtgctgtcgaataagttcaccctgaaagtgagggcagccatcagagctgtgccagttgtgtctgtctccaaagcaagctatcttcttagggagggggaagaattttcagtgacgtgcttgataaaagatgtgtctagttccgtggactcaatgtggataagggaaaacagccggactaaagaacaggtaaagagtagtagctcacatcagggtgacttcaattttgtacgtcaggaaagactgactatcagcccagcaagagttaacgattctggagtgttcatgtgttacgccaataatacttttggatcagcaaatgtcacaacaaccttggaagtagtagataaagggttcattaatgtcttccctatgatgaatactaccgtatttgtgaacgatggagagaatgtagatctgattgttgaatatgaatcctaccccaaacctgaacaccagcagtggatatatatgaacaggacctccactgataagtgggaagattatcccaagtctgagaacgaaagtaatatcagatatgtgagcgaacttcatctgactagattaaaaggcaccgaaggaggcacttacacgtttctagtgtccaattctgatgtcgattcttccgtgacatttaatgtttacgtgaacacaaaaccagaaatcctgactcgtgacaggctcatgaatggcatgctccagtgtgtggcagcaggattcccagagcccacaatagattggtatttttgtccaggaactgagcagagatgttccattcctgtggggccagtggatgtgaagatacaaaactcatccgtgtcaccgtttggaaaactcgtggttcaaagctccatcgattacagtgcattcaagcacaacggcacggtcgagtgtagggcttacaatgatgtgggcaagagttcggccttttttaactttgcatttaaagagcaaatccatccccacactctgttcacgcctttgctgattggtttcgtggtcgccgctggcatgatgtgcgtcatcgtgatggttcttacctacaaatatttacagaaacccatgtatgaagtacagtggaaggttgttgaggagataaatggaaacaattatgtgtacatagacccaacgcaacttccttatgatcacaaatgggagtttcccagaaacagactgagttttgggaaaaccttgggtgctggcgccttcggaaaggttgttgaggccactgcctacggcttaattaagtcggatgcggccatgactgttgctgtgaagatgctcaagccaagcgctcatttaacggaacgagaagccctaatgtctgaactcaaagtcttgagttaccttggtaatcacatgaatattgtgaatcttctcggagcatgcaccgttggagggcccaccctggtcattacggaatattgttgctatggtgatcttctgaattttttgagaagaaaacatgattcatttatttgctcaaagcaggaagatcacgcagaagcagcactttataagaaccttctgcattcaaaggagtcctcctgcaatgatagtactaatgagtacatggacatgaaacctggagtttcttatgtcgtacccaccaagacagacaagaggagagctgcgagaataggctcgtacatagaaagagacgtggctccgtccatcatggaagatgacgagctggccctagacctggaagacctgctcagcttttcttaccaggtggcaaagggcatggcgttccttgcctcaaagaactgtattcatagggacttggcagccagaaatatcctccttactcatggtcgaatcacaaagatttgtgattttggtctagccagagacatcaagaatgattctaattatgtggtcaaaggaaatgctcggctacctgtgaaatggatggcacctgaaagcattttcaactgtgtgtacacatttgaaagtgatgtctggtcctatgggatttttctgtgggagttgttctctttaggaagcagcccctaccctggaatgccagtcgattctaagttctacaagatgatcaaggaaggtttccgaatgctcagccctgagcatgcacctgctgaaatgtatgacataatgaagacttgctgggatgctgatcccctgaaaaggccaacattcaagcagatcgtgcagctaattgagaagcagatttcagatagcaccaatcatatttattccaacttagcgaactgcagcccccgccaggagaactccgcggtggaccattctgtgcggatcaattctgtcggcagcagcgcttcctccacccaacctctgctggtccacgaagatgtctga

SEQ ID NO: 41 - DNA, 401 bp, Equus caballus
  misc_feature (201)..(201): n is c or t
agtgctaaagaaaagccaaataactcatgattggagtcagttgggtttaatgcaagtcagttttgcagaggcagttttaaaggagagacatgaatcggcagaaatgcctgcccttccagtgacaataagtgaaaagagaagccatctatttgcatgttcttgagagaaaccaaatttgcctggctagagaagcattccagnttatttctgtaccccaaaggcagaatcacagggaacacaatagtgcaaacttaaatgacaacctctacaaagaatattcctctctcaactctcctctctctatgctatccggtcaaagccagaggtggagagtacctatatgttaatgcgttgaatatattaataacaaacatttgttttgaactccattttaaattagc

SEQ ID NO: 42 - DNA, 401 bp, Equus caballus
  misc_feature (201)..(201): n is c or t
gtattctcgggcaggtttcttgagccatttctctcaatagcaaaactgcctcgtgttccatttttgatttcagtgttgcttctctaacacatttgactttcaagcaatattgttttgctagctatcatgcatcatgaccataaaatttaaataattttcatctctgaagacaaaaggaagcaattgctaattttaaggaantgtatcgactcaactttgtttaraaaatttgaaaaaarcttgtcaacttgatatttcttaaggagatgcatatttaagtagctratttacacaggcagataacaacataaaccttacatcagttcttcaagtacttcaatcaatgcccatttctactcaattttaaattaaattcaactgaaaagatctctgtaaagagg

SEQ ID NO: 43 - DNA, 401 bp, Equus caballus
  misc_feature (201)..(201): n is c or t
tctggccccggctgggcgctggcctgggattcaccctctctggacaccagtttccacactaacgatatggagaggccaaagcagagaccctttgagaccccatccagctgggatcctctaagatcccaaagcagtgacgggayttggagctcaactggtcacagagaaaggagacctgtaatttggtgcctccatgccttngcacatctgatccctctacctggaatgtagctcttgtcatctttcacctggccaactcccactcattcattcacctaacctgacaaatcctgagcacctactaagtgctaggcaccaccagamgcattgagaacacaacaatgaacaagacgagtatggcctccaagtagctcgcatgtagcggaggagacagacatcac

SEQ ID NO: 44 - DNA, 401 bp, Equus caballus
  misc_feature (201)..(201): n is a or g
aatggtggaatagtaaacgaagtgataggagaacctctcttttgggaagaaggccaactggaagtctggaagcaaaaggatgactggcctaagcttggcccccgcccaccggggcctatccyggagcccagccccaactcctcccggtgcaacaccccaacacatacaacccaccagaaaactcgaacagggcagtccccncccccacaaacccccaaaacgacagcccctctccctcccccaatgcctgggaggtgctggcagagtgccccagtgctgtcaccacccagtctgctggcctctgcctgcttagctgcacatgcccctgcctgggcccccgcctcccctacccccgcaggggcctgccaggaaaaacattctctggaatccagaccatgacc

SEQ ID NO: 45 - DNA, 401 bp, Equus caballus; identical to SEQ ID NO: 41
  misc_feature (201)..(201): n is c or t

SEQ ID NO: 46 - DNA, 401 bp, Equus caballus
  misc_feature (201)..(201): n is c or a
gactgagtgaccgtctgcacattcaacaggagaaactaagcccccttctccaccctcttaagagtgccagcagccaggcatatgccagccatgcaggacgaagggctcatcttttccagtaaccaaaaagccctagaggaaaaaattctagatactaacatttgatgacacccagtcaccctgtacactgaagcccccatnaagcccaatccatccacacagcttctatcagcttttcagcgcctgggaaacacacatggtcaatttccctaacatagaaagtctacaaagggattaaacaaaagcaattttgtagttaaacattaaggaaaagaactggaatttataatatcagggaacatgccatgcatggacttaataattaatgcctttgccctggt

SEQ ID NO: 47 - DNA, 401 bp, Equus caballus
  misc_feature (201)..(201): n is a or c
agaatagagttttatcatcctcaaaagcacaaaatttaaatatggtaatttatctagtcactcatttttaaagtaccccatatttcctccaatcatttacctactaatctaaaaaaacagtgcctcccttttcatactaatctctggatcacctttctggttcccagaaacatcccctgggaatcaatgcaattttaaagnaaagaaagaaacggggaaaaaaaacacttgcttatatttgtttactttcatgctattccactagtttttctttttctttcttttcttttatttatttatttttttgggaagattagccctgaactagcatctgccgccaatcytcctctttttgctgaggcagactggccctaagctaacatccrtgcccatcttcctct

SEQ ID NO: 48 - DNA, 401 bp, Equus caballus
  misc_feature (201)..(201): n is a or g
cctcattagcacacctctacagccaagccatctactgggcacaaacctattttcctccttttcttaactaagatggatctgctgcactgatagcctacaaaatttcaatttcatcctgtatcaaatactttaggcgtataagagtatgaatggcacgttttaaaaacagaaattaagtaaaaatcgagttatagtactatnaaagacaagttccaaccacacttggttatccaaaagccaacagattcaaaatatgacagctctcttgccttttacttcatggaaggagtgagggagtaatttcataagtgatgaggccatgtgacaaataaattcagtgagagaacacaccagaaatggattttggagagaatccaagaaatcttggtatggaaaacatg

SEQ ID NO: 49 - DNA, 401 bp, Equus caballus
  misc_feature (201)..(201): n is t or c
ctgaaatctgtcccctaaataaaggtatgtgtgcttcacaactatttatatttacaaatagtgtcgctcaggtcttaaatcgaatgaatctactaaagcattagcagatgcttatttatgacatatatgtgttgtgaacacaaatgacagccaatttggcaccttacagctcacacagaagagtttctgtatgaaaggtangattaatttgctatgggaatacaattaccactcaacatttccctatttgcaaaaaaagtaggttgggtaaaagaaaggccatccatattcttacctagaagatttttttaccattactaagcaaatatttttgtggcatccctactatcaacgcttgatgactgacattaaggacattgtaggaatggagataggtgcgt

SEQ ID NO: 50 - DNA, 401 bp, Equus caballus
  misc_feature (201)..(201): n is a or g
ctaatctaggataaccagatttttggatgtccttaaactcttctcaatattaaaatttgatgaaaacattccatttatctagcaggcacagattaacagaaatgtaagtctcttaggattttcacttgaattcccctaagttctttcttytgaaatatttttccagcctcttttcctagttaattactattgacccctcantgtagcttaaaactcagatctttatgaagcctttcctgataccccatgctagatcaacccctcacatgatatacactgtttctctttcatgtcacttatcacagctgacaagcaacttagagtagttgttagtatctcagactctaaagccagactacccaggattaaatcttagctctcaatttattagctctgcagtc

SEQ ID NO: 51 - DNA, 401 bp, Equus caballus
  misc_feature (201)..(201): n is a or c
atgagaattcaatgggaagaagaatcaggagtggaaatctagtacatttcagttacacagcattcccgataaatattcgttgcatgaatgaatcgacctctggaaatattgggatagaaatgcttgacttccaagagcctgcagtattagaggtgtgtcaagtcattttatttagacattaataaaaagaatgctctcagnagcttgtaggagttggggacatccaggctcaaattgttgagacctagatattggaaaatgatccatttgaagaggatgctttaaggttgaggatgagaagttgaggctgctgattctagagaactgtgttttgtatttctgcatcttgcttgtgtttctgggagggagatatgggaaaatgttcttagatgtttctttaa

SEQ ID NO: 52 - DNA, 401 bp, Equus caballus
  misc_feature (201)..(201): n is c or t
agtggggctgtcagaggaacaccaatcaagctcatattaatggcagcaagagtcagaccaatgtaacagtcattctctggaagtatgtttgggcactggctgatggctcatccgtaaatcctagagctgaaatcccagtcctatccaggtgtaaattattgtacatcctatataattgggaaatttaaatgatcctaacantatctcttacctatcatccttagtctgctagttacaggcatttctatagcatttgttattgtaaagatgaatgaattggaatatagaataaaacctgcacatggaaagtaacaagtaaccgcaaccaagcaacaaaaggattcacattggatgataggaaggaaactcatccacagcttcaactagcatgcaacaccccc

SEQ ID NO: 53 - DNA, 401 bp, Equus caballus
  misc_feature (201)..(201): n is a or g
actggtttatgcattttgactggaatgagaatttactaatggtaaagatgtctaaaaaactggctatgaatacagagttttagaaggactatcaaaataaaactctctctacatgaaaaaataatacattatagtatttctatacacaaatctaaattgaatccacctctaaactgtgagctcagagcttagagagggcangtggatttttactctcataaattgttacttggaagcttagaaactgctttatagtcctaaatgctttctcccttccctcccagggaccagtgctcattgtactgcatgctatgactgcctggaactcctggacattgtccctttgacaatgcttctctctctctttacactcatgctcaagaggttgcacggagcagccc

SEQ ID NO: 54 - DNA, 401 bp, Equus caballus
  misc_feature (201)..(201): n is c or t
ttgccatcaattctaacctgaaatatgaattgagcatttaaaggatgattgtatgtaaataatataaaaggggtaatagtcatacattggcaatgttgagtttcaaagttagttttaaaggagatgctttatgtgtaatagtgaaaagtaaagataaaaaaataaaattgagaagaatatatctatatctgtagcaatacntatgcctataaccatatcagagtagaagcgggacaaaatgattgataagagcaaagtaattagcagtgaagttgtacagaggggtatgcagaaatgacacgtgggcgatgcagaatgaatgtaattttgaatgctaaatataaaaattaataaaatattaatttttcaatgataacttatcacaacgttatacatatatt

SEQ ID NO: 55 - DNA, 398 bp, Equus caballus
  misc_feature (201)..(201): n is a or g
tcaccctgcctcgtcctccagccctatcgccccgtctcccgaaaggtgccgggcggactcggggcggctgaggccagcggctgcagcggcggtagcggcggcggcggcgggaggcaggatgagcgcacgcggtgagggcgccgggcagccgtccacttcagcccagggacaacctgccgccccggcgcctcagaagagagnacgcggccgacccaggaagcagcagcaagtcagtacgcgggcggggtgggggcaccagcccgcctccgcgccctccgcgaaggcccggccacgcgcggccccgagcgcgggagccgggtcgccgcgcgccgcccgccggccggaggcgggggccgcggcgtctccggcgcgagtgcgcggcggagccccgggcgccc

1. A method of producing a non-human offspring animal having one or more predetermined traits, the method comprising:
(a) selecting one more predetermined traits desired in the offspring animal using a computer-implemented database system;
(b) interrogating the database system to identify one or more breeding pairs capable of producing the offspring animal;
(c) generating a probability matrix for each of the one or more breeding pairs using the database system, wherein the probability matrix comprises an array of probability values pertaining to the likelihood that the offspring animal produced by each said breeding pair will have the one or more predetermined traits;
(d) selecting, based on the array of probability values, one or more of the breeding pairs likely to produce the offspring animal having the one or more predetermined traits;
(e) breeding one or more of the selected breeding pairs to produce the offspring animal;
(f) performing genetic testing of the offspring animal to detect the presence of the one or more predetermined traits; and
(g) genetically modifying the offspring animal lacking the one or more predetermined traits to promote or improve expression of the one or more predetermined traits.

2. The method of claim 1, wherein the genetic testing of step (f) and/or the genetic modification of step (g) is performed in the offspring animal during embryonic development.

3. The method of claim 1, wherein the genetic testing of step (f) and/or the genetic modification of step (g) is performed in the offspring animal 3-60 days after conception.

4. The method of claim 1, further comprising birthing the offspring animal.

5. The method of claim 1, wherein the genetic testing of step (f) and/or the genetic modification of step (g) is performed in the offspring animal one day to four years after birth.

6. The method of claim 1, further comprising confirming the presence of one or more predetermined traits in the offspring animal after birth.

7. The method of claim 1, wherein the genetic testing is performed on a sample obtained from the offspring animal.

8. The method of claim 7, wherein the sample comprises blood, tissue, hair, an embryo of the offspring animal implanted as part of an in vitro fertilization procedure, cell-free fetal DNA, mitochondria, or a gamete.

9. The method of claim 8, wherein the gamete is an oocyte.

10. The method of claim 8, wherein the gamete is a spermatozoon.

11. The method of claim 8, wherein the gamete comprises a cytoplasm, a nucleus, a mitochondrion.

12. The method of claim 1, wherein the genetic testing is performed using Sanger sequencing, Next Generation Sequencing, microarray, AmpliSeq, genomic sequencing, or real-time quantitative polymerase chain reaction (RT-qPCR).

13. The method of claim 4, further comprising genetically modifying the offspring animal lacking the one or more predetermined traits after birth.

14. The method of claim 1, wherein the expression of the one or more predetermined traits results from expression of one or more genes.

15. The method of claim 1, wherein genetically modifying the offspring animal comprises modifying at least 1, at least 2, at least 3, at least 4, at least 5, at least 6, at least 7, at least 8, at least 9, or at least 10 genes in the offspring animal.

16. The method of claim 1, wherein genetically modifying the offspring animal comprises editing of an endogenous gene in the offspring animal.

17. The method of claim 16, wherein the endogenous gene comprises a polymorphism.

18. The method of claim 16, wherein the endogenous gene comprises a genetic mutation.

19. The method of claim 16, wherein the editing of the endogenous gene comprises modifying, deleting, or replacing at least one nucleotide of a DNA or an RNA encoding the endogenous gene in the offspring animal.

20. The method of claim 16, wherein the editing of an endogenous gene comprises inserting a donor polynucleotide into a region of the endogenous gene in the offspring animal.

21. The method of claim 20, wherein the donor polynucleotide comprises a segment of the endogenous gene that lacks the polymorphism.

22. The method of claim 20, wherein the donor polynucleotide comprises a segment of the endogenous gene that lacks the genetic mutation.

23. The method of claim 16, wherein the editing of an endogenous gene comprises administering to the offspring animal a polynucleotide encoding one or more copies of a wild type variant of the endogenous gene.

24. The method of claim 16, wherein editing of an endogenous gene comprises introducing a heterologous transgene into the genome of the offspring animal.

25. The method of claim 16, wherein editing of an endogenous gene comprises modulating expression of an endogenous gene in the offspring animal.

26. The method of claim 16, wherein genetically modifying the offspring animal is performed using a clustered regularly interspaced short palindromic repeats (CRISPR)-Cas system, a transcription activator-like effector nuclease (TALEN), or a zinc finger nuclease (ZFN).

27. The method of claim 26, wherein the CRISPR-Cas system comprises at least one guide RNA (gRNA) and at least one Cas9 endonuclease.

28. The method of claim 27, wherein the Cas9 endonuclease comprises a nuclease-competent Cas9 endonuclease or a nuclease-inactivated Cas9 (dCas9) endonuclease.

29. The method of claim 28, wherein the dCas9 endonuclease is fused to a transcriptional regulator domain.

30. The method of claim 29, wherein the transcriptional regulator domain is selected from a group consisting of VP16, VP64, p65, RTA, VPR, SAM, SunTag, and KRAB.

31. The method of claim 1, wherein the breeding pair capable of producing the offspring animal is integrated into the database system by:
(a) providing information about one or more predetermined traits in the breeding pair, wherein the information comprises:
(i) results of previously performed genetic testing and/or non-genetic assessment of the breeding pair, wherein the results of the previously performed genetic testing or non-genetic assessment identify the breeding pair as having one or more of the predetermined traits; and/or
(ii) results of genetic testing and/or non-genetic assessment of the breeding pair confirm the presence of one or more of the predetermined traits the breeding pair;
(b) cataloguing the information of step (a) into the database system;
wherein the database system is configured for interrogation by a user and is configured to produce the probability matrix of step (c) of claim 1 following said interrogation.

32. The method of claim 1, further comprising registering the offspring animal having the one or more predetermined traits in the database system as a breeder animal.

33. A method for interrogating a computer-implemented database system to identify one or more breeding pairs capable of producing a non-human offspring animal having one or more predetermined traits, the method comprising the steps of:
(a) selecting one or more predetermined traits desired in the offspring animal using the database system;
(b) identifying the one or more breeding pairs capable of producing the offspring animal using the database system;
(c) generating a probability matrix for each of the one or more breeding pairs using the database system, wherein the probability matrix comprises an array of probability values pertaining to the likelihood that the offspring animal produced by each said breeding pair will have the one or more predetermined traits and displaying the probability matrix on a computer-implemented interface;
(d) selecting, based on the array of probability values, one or more of the breeding pairs likely to produce the offspring animal having the one or more predetermined traits; and
(e) breeding the one or more breeding pairs to produce the offspring animal;
wherein the database comprises a panel of at least 2 predetermined traits.

34. The method of claim 33, wherein the database comprises a panel of 2-40 predetermined traits.

35. The method of claim 34, wherein the database comprises a panel of at least 4 predetermined traits.

36. The method of claim 35, wherein the database comprises a panel of at least 6 predetermined traits.

37. The method of claim 36, wherein the database comprises a panel of at least 8 predetermined traits.

38. The method of claim 37, wherein the database comprises a panel of at least 10 predetermined traits.

39. The method of claim 33, wherein the method comprises selecting a panel of 2-40 predetermined traits.

40. The method of claim 39, wherein the method comprises selecting a panel of 2 or more predetermined traits.

41. The method of claim 40, wherein the method comprises selecting a panel of 4 or more predetermined traits.

42. The method of claim 41, wherein the method comprises selecting a panel of 6 or more predetermined traits.

43. The method of claim 42, wherein the method comprises selecting a panel of 8 or more predetermined traits.

44. The method of claim 43, wherein the method comprises selecting a panel of 10 or more predetermined traits.

45. The method of claim 33, further comprising confirming the presence of one or more of the predetermined traits in the offspring animal.

46. The method of claim 45, wherein the method comprises confirming the presence of 2-40 predetermined traits.

47. The method of claim 46, wherein the method comprises confirming the presence of 2 or more of the predetermined traits.

48. The method of claim 47, wherein the method comprises confirming the presence of 4 or more of the predetermined traits.

49. The method of claim 48, wherein the method comprises confirming the presence of 6 or more of the predetermined traits.

50. The method of claim 49, wherein the method comprises confirming the presence of 8 or more of the predetermined traits.

51. The method of claim 50, wherein the method comprises confirming the presence of 10 or more of the predetermined traits.

52. The method of claim 33, wherein genetic testing was previously performed on the breeding pair.

53. The method of claim 33, further comprising registering the offspring animal having the one or more predetermined traits in the database system as a breeder animal.

54. A method of producing a set of guidelines for breeding of a non-human animal, comprising:
(a) identifying the non-human animal in a computer-implemented database and assessing the presence of one or more predetermined traits in the non-human animal using the computer-implemented database system, comprising:
(i) generating a probability matrix for the non-human animal using the database system, wherein the probability matrix comprises an array of probability values pertaining to the likelihood that the non-human animal has the one or more predetermined traits; and
(ii) displaying the probability matrix on a graphical user interface;
(b) determining, based on the assessment of step (a), one or more conditions under which the non-human animal will develop or is at risk of developing a disease or non-disease condition; and
(c) generating the set of guidelines for breeding of the non-human animal to avoid manifestation of the disease or non-disease condition.

55. The method of claim 54, wherein the non-human animal is used in a breeding pair to produce an offspring animal.

56. The method of claim 54, wherein the set of guidelines comprises one or more recommendations for mitigating or avoiding the one or more conditions that would result in manifestation of one or more symptoms of the disease or non-disease condition and/or for reducing the likelihood of producing an effect in the offspring animal resulting from development of the disease or non-disease condition.

57. The method of claim 54, wherein the non-human animal is a female parent animal.

58. The method of claim 54, wherein the non-human animal is a male parent animal.

59. The method of claim 54, wherein the set of guidelines provides one or more recommendations that increases the likelihood of producing a non-human offspring animal having one or more predetermined traits.

60. The method of claim 59, wherein the one or more recommendations pertain to a diet, exercise regime, discipline, environmental exposure, medication, supplementary treatments, training, conditioning, use, or and/or limitation the non-human animal.

61. A method of generating a computer-implemented database system for producing a non-human offspring animal having one or more predetermined traits, comprising:
(a) providing information about the one or more predetermined traits from a plurality of non-human animals of a same type as the offspring animal, wherein the information comprises:
(i) results of previously performed genetic testing and/or non-genetic assessment of the plurality of non-human animals, wherein the results of the previously performed genetic testing or non-genetic assessment identify the plurality of non-human animals as having one or more of the predetermined traits; and/or
(ii) results of genetic testing and/or non-genetic assessment of the plurality of non-human animals that confirm the presence of one or more of the predetermined traits in the plurality of non-human animals;
(b) cataloguing the information of step (a) into the database system;
wherein the database system is configured for interrogation by a user and is configured to produce a probability matrix based on the information catalogued in step (b) following said interrogation.

62. The method of claim 61, wherein the interrogation comprises selecting one or more predetermined traits desired in the offspring animal and identifying from the plurality of non-human animals a breeding pair capable of producing said offspring animal.

63. The method of claim 61, further comprising selecting a breeding pair capable of producing the offspring having the one or more predetermined traits.

64. The method of claim 63, wherein the probability matrix comprises an array of probability values pertaining to the likelihood of the selected breeding pair producing a non-human offspring animal having the one or more predetermined traits.

65. The method of claim 61, wherein the probability matrix comprises an array of probability values pertaining to the likelihood of the plurality of non-human animals having the one or more predetermined traits.

66. The method of claim 61, wherein the non-genetic assessment comprises:
(a) obtaining or having obtained information from someone knowledgeable about the non-human animal pertaining to the one or more predetermined traits;
(b) performing or having performed one or more clinical assays on biological tissue obtained from the non-human animal pertaining to the one or more predetermined traits;
(c) performing or having performed one or more diagnostic tests on the non-human animal pertaining to the one or more predetermined traits; and/or
(d) obtaining scores assigned to the non-human animal during a competition pertaining to the one or more predetermined traits.

67. A computer-implemented interface for assisting a user in producing, procuring, and/or identifying one or more non-human animals having one or more predetermined traits, wherein the interface is configured to allow a user to interrogate a computer-implemented database system, the interrogation comprising:
(a) selecting the one or more predetermined traits of interest for the one or more non-human animals;
(b) identifying one or more of the non-human animals catalogued in the database system and generating a probability matrix for each of the one or more non-human animals identified using the database system;
(c) based on the probability matrix of step (d), displaying an overall assessment of each of the non-human animals having the one or more predetermined traits; and
(d) providing an option for the user to produce, purchase, or lease one or more of the non-human animals having the one or more predetermined traits;
wherein the computer-implemented interface is in communication with the database system.

68. The interface of claim 67, wherein step (a) further comprises selecting one or more predetermined traits of at least one parent of the one or more non-human animals.

69. The interface of claim 67, wherein step (a) further comprises selecting a gene pool from which the one or more non-human animals or the at least one parent of the non-human animal are obtained.

70. The interface of claim 69, wherein the gene pool is selected from a group consisting of the user's own animals, animals owned by other users, an animal registry, and animals located within a specified geographical area.

71. The interface of claim 67, wherein the probability matrix comprises an array of probability values pertaining to the likelihood of the non-human animal having one or more predetermined traits.

72. A method using a computer-implemented database system to identify a non-human animal as having one or more predetermined traits, comprising:
(a) providing information about the non-human animal;
(b) cataloguing the information of step (a) into the database system;
(c) comparing the information of step (b) to information about a plurality of non-human animals having the one or more predetermined traits, wherein the information about the plurality of non-human animals has been previously catalogued in the database system;
(d) generating a probability matrix for the non-human animal based on the comparison of step (c) using the database system, wherein the probability matrix comprises an array of probability values pertaining to the likelihood that the non-human animal has the one or more predetermined traits;
(e) identifying the non-human animal as having the one or more predetermined traits based on the probability matrix of step (d); and
(f) optionally, genetically modifying the non-human animal to promote or suppress an expression of the one or more predetermined traits in the non-human animal;
wherein the information comprises results of previously performed genetic testing and/or non-genetic assessment of the non-human animal or the plurality of non-human animals.

73. The method of any one of claims 1, 33, 54, 61, and 72, wherein the one or more predetermined traits comprise coat color, coat color modifier, coat texture, coat thickness, facial marking, leg marking, eye color, skin color, mane color, tail color, speed, gait, temperament, and health.

74. The method of claim 73, wherein the coat color, mane color and/or tail color is selected from a group consisting of amber champagne, amber champagne dun, amber cream, amber dun, amber dun pearl, apricot dun, apricot pearl, agouti, bay, bay cream pearl, bay double cream, bay pearl, black, black bay, black cream pearl, black double cream, black dun, black pearl, black/red, blanket appaloosa, blood bay, blue roan, brindle, brown, buckskin, buttermilk buckskin, champagne, champagne amber pearl, champagne classic pearl, champagne dun, champagne dun pearl, champagne gold pearl, champagne pearl, chesetnut, chestnut cream pearl, chocolate, classic champagne, classic champagne dun, classic cream, classic dun, cream, cream champagne, cream grullo, cream pearl, cremello, dapple grey, dark bay, dark brown, dark chestnut, dominant white, dun, dun bay cream, dun bay double cream, dun black cream, dun black double cream, dun chestnut cream, dun chestnut double cream, dun pearl, dun pearl bay, dun pearl black, dunalino, dunolino, dunskin, dunskin splash, flaxen chestnut, fleabitten grey, frame overo, frosted appaloosa, grey, gold champagne, gold cream, gold dun, gold dun pearl, grey, grullo, half blanket, leopard appaloosa, light grey, liver chestnut, marbled appaloosa, overo, palomino, pearl, perlino, perlino dun, pseudocream classic, red, red chestnut, red dun, red roan, rose grey, sabino, seal brown, silver, silver amber champagne, silver amber dun, silver bay cream, silver bay cream pearl, silver bay double cream, silver black, silver black cream pearl, silver black double cream, silver champagne, silver champagne dun, silver champagne pearl, silver classic champagne, silver classic champagne pearl, silver cream pearl, silver dapple, silver dapple bay, silver dapple buckskin, silver dapple cream grullo, silver dapple dun, silver dapple dunskin, silver dapple grullo, silver dapple pearl, silver dapple perlino, silver dapple perlino dun, silver dun, silver dun bay cream, silver dun bay double cream, silver dun black, silver dun black double cream, silver dun pearl, silver dun pearl bay, silver dun pearl black, silver pearl bay, silver pearl black, silver red, silver smoky cream, skewbald, smoky black, smoky cream, smoky grullo, snowflake appaloosa, sorrel, splashed white, steel grey, sun, tobiano, tovero, tri-color, white, and white spotting.

75. The method of claim 73, wherein the coat color modifier is selected from a group consisting of apron, barring on body, barring on shoulder, belly spots (large or small), belly stripe, belted, bend or spots on body, bend or spots on head, birdcatcher spots, black spots, blagdon, blanket with roaning, blanket with spots, blaze, blaze with freckling, body spots, body white, brindle, brow spots, calico, coon/skunk tail, dapples, dilute, dorsal stripe, double dilute, ermine markings, few white hairs on body, fewspot, flaxen mane/tail, flea-bitten, fleshmark, frosted, grullo, heart marking, highlights in mane/tail, lacing pattern, leopard spotted, lightning marks, line back, frosting mane/tail, maximum tobiano, maximum overo, maximum white, maximum white sabino, medicine hat, minimal overo, minimal sabino, minimal tobiano, mixed mane/tail, mottled, no marking, overo, pangare, paw prints, pearl, piebald, pinto markings, rabicano, roan, roaning on body, rose, rump spots, sabino, skewbald, smudge marks, smutty, snip, snowcap, sooty, splash markings, star, stripe, tobiano, umbilical spots, white head, white mane/tail, white throat latch, white tipped ears, white with fading edges, white with ragged edges, white with smooth edges, wither spot, no markings, solid, white blaze, and white star.

76. The method of claim 73, wherein the facial marking is selected from a group consisting of apron face, badger face, bald face, blaze, interrupted stripe, face, snip, star, stripe markings, both eyes amber, both eyes blue, both eyes brown, both eyes green, both eyes tiger, eyebrows, face mask, few white hairs on forehead, left eye amber, left eye blue, left eye brown, left eye green, left eye partial blue, left eye tiger, partial bald face, pigment around eye, right eye amber, right eye blue, right eye brown, right eye green, right eye partial blue, right eye tiger, white around eye, white chin, white jaw, white lip, white nose, and white sclera.

77. The method of claim 73, wherein the leg marking is selected from a group consisting of two back white stockings, two white front socks, two white front stockings, two white hind socks, two white hind stockings, four white socks, four white stockings, back left above hock, back left cannon (¾ stocking), back left coronet, back left ermine spots, back left fetlock, back left half pastern, back left heel, back left partial heel, back left pastern, back left sock, back left stocking, back left stripes, back right above hock, back right cannon, back right coronet, back right ermine spots, back right fetlock, back right half pastern, back right heel, back right partial heel, back right pastern, back right sock, back right stocking, back right stripes, barring on legs, bend or spots on legs, front left above knee, front left cannon, front left coronet, front left ermine spots, front left fetlock, front left half pastern, front left heel, front left partial heel, front left pastern, front left sock, front left stocking, front left stripes, front right above knee, front right cannon, front right coronet, fright right ermine spots, front right fetlock, front right half pastern, front right heel, front right partial heel, front right pastern, front right sock, front right stocking, front right stripes, left front hoof stripes, left front white foot, left hind hoof stripes, left hind white foot, right front hoof stripes, right front white foot, right hind hoof stripes, right hind white foot, and roaning on white socks/stockings.

78. The method of claim 73, wherein the coat texture comprises smooth, rough, curly, straight, downy, spiky, or brindle.

79. The method of claim 73, wherein the coat thickness comprises thick, medium, or thin.

80. The method of claim 73, wherein the eye color comprises blue, amber, yellow, orange, hazel, green, or brown.

81. The method of claim 73, wherein the skin color comprises pink, black, brown, yellow, and white.

82. The method of claim 73, wherein the speed is selected from the group consisting of endurance, mid-distance, and sprint.

83. The method of claim 73, wherein the gait is selected from the group consisting of non-gaited, gait carrier, and gaited.

84. The method of claim 83, wherein gaited comprises walk, trot, canter, gallop, pacing, fox trot, racking, country pleasure, Indian shuffle, jogging, paso fino, paso corto, paso largo, paso llano, sobrandando, marcha picada, rack, running walk, stepping pace, singlefoot, tölt, and ravaal.

85. The method of claim 73, wherein the temperament is selected from the group consisting of vigilant, curious/vigilant, curious, spooky, non-spooky, hot, cold, and medium.

86. The method of claim 73, wherein the health comprises variants of one or more genes associated with one or more disease or non-disease conditions that are undesired in the non-human animal.

87. The method of any one of claims 1, 33, 55, and 62, wherein each of the one or more breeding pairs comprise at least a first non-human parent animal and a second non-human parent animal.

88. The method of claim 87, wherein the method further comprises selecting the sex, breed, and/or discipline of the offspring animal, the first parent animal, and/or the second parent animal.

89. The method of claim 88, wherein the breed is selected from the group consisting of Abyssianian/Ethiopian/Oromo/Gala horse, Abyssinian, Akhal Teke, Albanian, Albanian Horse, Alt-Olderburger, Altai Horse, American Cream Draft, American Cream and White, American Curly, American Gaited Mountain Horse, American Gaited Pony, American Paint Horse, American Quarter Horse, American Saddlebred, American Walking Pony, American Warmblood, Andalusian, Andravida, Andravida/Eleia Horse, Anglo European Warmblood, Anglo-Arab, Anglo-Kabarda, Appaloosa, Appendix Quarter Horse, AraAppaloosa, Arabian, Arabian Sporthorse, Ardennes, Ardennes Horse, Argentine Criollo, Asturcon, Asturian, Australian Brumby, Australian Stock Horse, Austrian Warmblood, Azteca, Baise Horse, Balearic, Baluchi, Baluchi Horse, Ban-ei, Banker, Banker Horse, Barb, Barb/Berber Horse, Bashkir, Bashkir Curly, Bashkir Curly Horse, Bashkir Horse, Basotho Pony, Basuto Pony, Belgian, Belgian Draft, Belgian Warmblood, Bhirum Pony, Bhirum/Nigerian Pony, Bhotia Pony, Bhutia Pony, Black Forest, Black Forest Pony, Blue Eyed Horse Association, Boer, Boerperd, Brandenburger, Breton, Breton Horse, British Riding Pony, British Warmblood, Buckskin, Budyonny, Budyonny Horse, Byelorussian Harness, Byelorussian Harness Horse, Camargue, Camargue Horse, Campolina, Canadian Horse, Canadian Sport Horse, Canadian Suffield Mustang, Canadian Warmblood, Carolina Marsh Tacky, Carthusian, Caspian, Caspian Horse, Cayuse, Celtic Warmblood, Cheju, Chicoteague Pony, Chilean Corralero, Chilean Corralero Horse, Chincoteague Pony, Cleveland Bay, Clydesdale, Colorado Ranger Horse, Connemara, Cream Draft, Cremello, Criollo, Crioulo, Curly Horse, Dales Pony, Danish Warmblood, Danube, Danube Delta Horse, Dartmoor Pony, Deliboz, Deliboz/Delibozskaya, Djerma, Dole, Dole Gudbrandsdal/Dolahest/Døle, Dongola, Donkey, Draft, Draft Cross, Draft Horse, Drum Horse, Dutch Draft, Dutch Harness, Dutch Harness Horse, Dutch Warmblood, East Bulgarian, East Friesian, Egyptian, Egyptian Arabian, Eriskay Pony, Estonian Horse/Estonian Native/Estonian Klepper/Eisti Hobune, Estonian Native, Exmoor Pony, Faeroe Pony, Faeroes Pony, Falabella, Falabella Miniature Horse, Fell Pony, Ferghana, Finnhorse, Finnhorse/Finnish Horse, Fjord, Fjord Horse, Fleuve, Florida Cracker, Florida Cracker Horse, Foundation Quarter Horse, Fouta, Foutanke/Fouta, Frederiksborg, Frederiksborg Horse, French Saddlebred, French Saddlebred Horse, French Trotter, Friesian, Friesian Cross, Galiceño, Galician Pony, Galician/Galician Mountain Horse, Gelderlander, Georgian Grande, German Bred, German Riding Pony, Gidran, Gidran/Hungarian Anglo-Arab, Golden American Saddlebred, Gotland, Gotland Pony, Groningen, Groningen Horse, Guangxi, Gypsy Cob, Gypsy Vanner, Hackney, Hackney Horse, Hackney Pony, Haflinger, Half-Arabian, Hanoverian, Hanoverian Warmblood, Hequ, Highland Pony, Hokkaido, Hokkaido Horse, Holsteiner, Holsteiner Warmblood, Hucul, Hucul Pony, Hungarian Warmblood, Iberian Warmblood, Icelandic, Icelandic Horse, lomud, lomud/Yomud/Yamud/Yomut, Irish Cob, Irish Draft, Irish Draught, Irish Draught Horse, Irish Sport Horse, Jeju Horse, Jinzhou, Jutland, Kabarda, Kabarda/Kabardin, Karabair, Karabakh, Kazakh, Kazakh Horse, Kentucky Mountain horse, Kentucky Mountain Saddle Horse, Kerry Bog Pony, KigeR Mustang, Kirdi Pony, Kisber Felver, Kiso, Kiso Horse, Kladbury, Kladbury Horse, Knabstrup, Knabstrupper Warmblood, Kushum, Kushum Horse, Kustanai, Kustanai Horse, Kyrgyz/Kirgiiz Horse, Latvian, Latvian Horse, Lipizzan, Lithuanian Heavy Draft, Lokai, Losino, Losino Horse, Lusitano, M Bayar, Mallorquin, Malopolski, Mangalarga, Mangalarga Marchador, Marsh Tacky, Marwari, Marwari Horse, Wrens Pony, Messara, Messara Horse, Miniature, Miniature Horse, Misaki, Misaki Horse, Missouri Fox Trotter, Missouri Fox Trotting Horse, Miyako, Miyako Pony, Mongolian, Mongolian Horse, Morab, Morgan, Mountain Pleasure Horse, Moyle, Mule, Murgese, Mustang, National Show horse, National Spotted horse, New Forest Pony, New Kirgiz, Newfoundland Pony, Nokota, Nokota Horse, Noma, Noma Horse, Nooitgedacht Pony, Nordland, Nordlandshest/Lyngshest/Nordland Pony, Norfolk Trotter, Noric, North Swedish horse, Northeastern, Ob, Oldenburg, Oldenburg Warmblood, Orlov Trotter, Paint (Overo), Paint (Solid), Paint (Tobiano), Paint (Tovero), Paints (All), Palomino, Pantaneiro, Pantaneiro horse, Paso Fino, Paulista Marchador, Peneia Pony, Percheron, Peruvian Paso, Pindos Pony, Pinia, Pintabian, Pinto, POA, Polish Horse, Ponies (All), Pony, Pony of America, Pottok, Priob/Ob, Przewalski, Przewalski Horse, Pura Raza Espanola (PRE), Pyrenean Tarpan, Qatgani, Qatgani/Qataghani Horse, Quarab, Quarter Horse, Quarter Horse Cross, Quarter Pony, Racking Horse, Rheinland Pfalz Saar, Rhenish Warmblood, Rhinelander horse, Rocky Mountain, Rocky Mountain Horse, Russian Don, Russian Heavy Draft, Russian Trakhener, Russian Trotter, Sanhe, Sanhe Horse, Schleswiger Heavy Draft, Scharzwälder Fuchs, Selle Francais, Shagya, Shagya Arabian, Shetland Pony, Shire, Single-Footing Horse, Skyros Pony, Somali Pony, Sorraia, Soviet Heavy Draft, Spanish Mustang, Spanish-Barb, Spanish-Norman, Spanish-Normal Horse, Sport Horse of Color, Spotted Draft, Spotted Draft Horse, Spotted Saddle, Spotted Saddle Horse, Standardbred, Sudan Country-Bred, Sudan Country-Bred Horse, Suffolk, Suffolk/Suffolk Punch/Suffolk Sorrel, Swedish Warmblood, Taishu/Tsushima, Taishuh, Tarpan, Tawleed, Tennessee Walker, Tennessee Walking Horse/Tennessee Walker, Tersk, Tersk Horse, Thessalian, Thessalian/Thessaly Horse, Thoroughbred, Thoroughbred Cross, Tibetan Pony, Tiger horse, Tokara, Tori, Tori Horse, Trakehner, Ukrainian Riding Horse/Ukrainian Saddle Horse, Ukrainian Saddle, Virginia Highlander, Vlaamperd, Vladimir Heavy Draft, Vyatka, Vyatka Horse, Walkaloosa, Warmblood, Warmblood Cross, Warmblood (All), Warmbloods of Color, Welara Pony, Welsh Cob, Welsh Pony, Weser-Em Pony, West African Barb, Western Sudan Pony, Westphalian, Wielkopolski, Wurttemberger Warmblood, Xilingol, Yakut, Yanqi, Yili, Yonaguni, Zangersheide, Zaniskari Pony, Zhemaichu, and Zorse.

90. The method of claim 89, wherein the discipline is selected from the group consisting of barrel racing, beginner/family, breeding, brood mare, calf roping, companion only, competitive trail competitions, country pleasure, cowboy mounted shooting, cutting, draft, dressage, drill team, driving, endurance riding, English pleasure, equitation, eventing, field hunter, gaited, halter, harness, horsemanship, hunter, hunter under saddle, judged pleasure rides, jumper, lesson horse, longe-line, pleasure driving, pole bending, polo, racing, ranch horse, ranch sorting, reined cow horse, reining, rodeo, roping, showmanship, saddle seat, sidesaddle, steer wrestling, team penning, team roping, team sorting, trail horse, vaulting, Western pleasure, Western pleasure (show), Western riding, working cattle, youth/4-H horse, all around, 4-in hand driving, agility, breed shows, breeding stallion, broodmare, bull fighting, camping, cart, combined driving, cowboy dressage, cowboy racing, doma vaquero, field trials, gymkhana, harness racing, hazing, horse ball, marathon driving, mounted archery, mounted games, mounted patrol, mounted police, native costume, natural horsemanship, nurse mare, pacing, pack horse, parades, park, playday, polocrosse, ranch versatility, recipient broodmare, roadster, rodeo bronc, rodeo pickup horse, rodeo queen horse, roping, saddleseat, search and rescue, show hack, ski joring, steer roping, stock horse, sulky racing, team driving, team roping head horse, team roping heel horse, therapeutic riding, trial class competition, recreational trail riding, turnback horse, Western dressage, working equitation, hunt seat, show jumper, riding, pleasure, and bucking horse.

91. The method of any one of claims 1, 33, 55, and 62, wherein the likelihood that the offspring animal produced by each said breeding pair will have the one or more predetermined traits is at least 6.25%, 12.5%, 25%, 50%, 60%, 70%, 80%, 90%, 95%, 99%, or 100%.

92. The method of claim 54, wherein the disease or non-disease condition is selected from a group consisting of anhidrosis, androgen insensitivity syndrome, cerebellar abiotrophy, curved ear tips, dwarfism, degenerative suspensory ligament disease, equine asthma, equine herpes virus risk, epistaxis risk, equine metabolic syndrome, laminitis, equine recurrent uveitis, equine viral arteritis susceptibility, foal immunodeficiency syndrome, gait transition, glycogen branching enzyme disorder, hereditary equine regional dermal asthenia, hoof wall separation disease, hydrocephalus, hyperkalemic periodic paralysis, immune-mediated myositis, impaired acrosomal reaction, junctional epidermolysis bullosa, kissing spines, lavender foal syndrome, lordosis, malignant hyperthermia, myotonia, navicular disease, osteochondritis dissecans, polysaccharide storage myopathy, recurrent laryngeal neuropathy, severe combined immunodeficiency, squamous cell carcinoma, tendinopathy, warmblood fragile foal syndrome, West Nile Virus susceptibility, wobbler syndrome, and behavioral abnormality.

93. The method of claim 92, wherein the behavioral abnormality is selected from the group consisting of cribbing, teeth grinding, weaving, anxiety, depression, extreme aggression, extreme fearfulness, bucking, striking, biting, self-mutilating, and head shaking.

94. The method of any one of claims 1, 33, 54, 61, and 72, wherein the one or more predetermined traits comprise at least 2 or more predetermined traits.

95. The method of claim 94, wherein the one or more predetermined traits comprise at least 4 or more predetermined traits.

96. The method of claim 95, wherein the one or more predetermined traits comprise at least 6 or more predetermined traits.

97. The method of claim 96, wherein the one or more predetermined traits comprise at least 8 or more predetermined traits.

98. The method of claim 97, wherein the one or more predetermined traits comprise at least 10 or more predetermined traits.

99. The method of any one of claims 1, 33, 54, 61 72, and 87, wherein the computer-implemented database system comprises genetic and non-genetic information about the non-human animal, non-human parent animal, and/or non-human offspring animal.

100. The method of any one of claims 1, 52, 61, and 72, wherein the genetic testing comprises genotyping the non-human animal for any one of the following genetic markers:
(a) agouti, black/red, brindle, champagne, cream, dominant, white, frame overo, grey, pearl, sabino, silver, splashed white, tobiano, and white spotting;
(b) a curiosity gene that is a dopamine D4 receptor (DRD4) gene;
(c) a speed gene that is a myostatin (MSTN) gene;
(d) a gait gene that is a doublesex and mab-3-related transcription factor 3 (DMRT3) gene; and/or
(e) a health gene selected from the group consisting of androgen receptor (AR), mutY DNA glycosylase (MUTYH), teashirt zinc finger homeobox 1 (TSHZ1), aggrecan (ACAN), family with sequence similarity 174 member A (FAM174A), interleukin 17A (IL17A), interleukin 17B (IL17B), chemokine (C-X-C motif) ligand 16 (CXCL16), solute carrier family 5 member 3 (SLC5A3), glycogen branching enzyme (GBE1), peptidylprolyl isomerase B (PPIB), serpin family B member 11 (SERPINB11), beta-1,3-N-acetylgalactosaminyltransferase 2 (B3GALNT2), sodium voltage-gated channel alpha subunit 4 (SCN4A), myosin heavy chain 1 (MYH1), FKBP prolyl isomerase 6 (FKBP6), laminin subunit gamma 2 (LAMC2), myosin 5A (MYOSA), equine chromosome 20 (ECA20), ryanodine receptor 1 (RYR1), chloride voltage-gated channel 4 (CLCN4), glycogen synthase 1 (GYS1), equine chromosome 3 (ECA3), protein kinase DNA-activated catalytic subunit (DNAPK), damage specific DNA binding protein 2 (DDB2), procollagen-lysine, 2-oxoglutarate 5-dioxygenase 1 (PLOD1), 2′-5′-oligoadenylate synthetase 1 (OAS1), melanocyte inducing transcription factor (MITF), paired box (PAX), proto-oncogene receptor tyrosine kinase (KIT), high mobility group AT-hook 2 (HMGA2), zinc finger and AT-hook domain containing (ZFAT), ligand dependent nuclear receptor corepressor like (LCORL), non-SMC condensing I complex subunit G (NACPG), and LIM and SH3 protein 1 (LASP1).

101. The method of claim 100, wherein the genetic testing comprises performing analysis of an entire genome of the non-human animal.

102. The method of claim 101, wherein the analysis of an entire genome comprises genome wide association study (GWAS).

103. The method of any one of claims 1, 54, and 87, wherein the non-human animal, non-human parent animal, or non-human offspring animal is selected from the group consisting of horse, cattle, sheep, dog, cat, camel, pig, goat, alpaca, donkey, llama, red fox, mouse, rat, ferret, non-human primate, rabbit, gerbil, hamster, chinchilla, or guinea pig.

104. The method of any one of claims 1, 33, 54, 61, and 72, wherein the method further comprises generating a shared centimorgan (cM) value for the non-human animal or non-human offspring animal based on a sample obtained from the non-human animal or non-human offspring animal, respectively.

105. The method of any one of claims 1, 33, 54, 61, and 72, wherein the method further comprises generating a kinship coefficient for the non-human animal or non-human offspring animal based on a sample obtained from the non-human animal or non-human offspring animal, respectively.

106. The method of any one of claims 1, 33, 54, 61, and 72, wherein the method further comprises generating a heterozygosity score for the non-human animal or non-human offspring animal based on a sample obtained from the non-human animal or non-human offspring animal, respectively.

107. The method of any one of claims 1, 33, 54, 61, and 72, wherein the method further comprises generating an inbreeding coefficient (F) for the non-human animal or non-human offspring animal based on a sample obtained from the non-human animal or non-human offspring animal, respectively.

108. The method of any one of claims 1, 33, 54, 61, and 72, wherein the method further comprises performing a breed composition analysis on a sample from the non-human animal or the non-human offspring animal.

109. The method of any one of claims 1, 33, 54, 61, and 72, wherein the method further comprises performing an identity-by-descent analysis on a sample from the non-human animal or the non-human offspring animal.

110. The method of claim 104, wherein the sample is a biological sample

111. The method of claim 110, wherein the biological sample is a hair sample, such as a hair sample comprising one or more hair follicles.
